(19) United States
(12) Patent Application Publication
(10) Pub. No.: US 2006/0148743 A1
(43) Pub. Date: Jul. 6, 2006

(54) RNA interference mediated inhibition of histone deacetylase (HDAC) gene expression using short interfering nucleic acid (siNA)

(76) Inventors: Vasant Jadhav, Longmont, CO (US); Joseph M. Carroll, Boulder, CO (US)

Correspondence Address: MCDONNELL BOEHNEN HULBERT & BERGHOFF LLP, 300 S. WACKER DRIVE, 32ND FLOOR, CHICAGO, IL, 60606, US

(21) Appl. No.: 11/217,936

(22) Filed: Sep. 1, 2005

Related U.S. Application Data
(63) Continuation-in-part of application No. 11/098,303, filed on Apr. 4, 2005.
Application No. 11/098,303 is a continuation-in-part of application No. 10/923,536, filed on Aug. 20, 2004.
Application No. 10/923,536 is a continuation-in-part of application No. PCT/US04/16390, filed on May 24, 2004.
Application No. PCT/US04/16390 is a continuation-in-part of application No. 10/826,966, filed on Apr. 16, 2004.
Application No. 10/826,966 is a continuation-in-part of application No. 10/757,803, filed on Jan. 14, 2004.
Application No. 10/757,803 is a continuation-in-part of application No. 10/720,448, filed on Nov. 24, 2003, now abandoned.
Application No. 10/720,448 is a continuation-in-part of application No. 10/693,059, filed on Oct. 23, 2003, now abandoned.
Application No. 10/693,059 is a continuation-in-part of application No. 10/444,853, filed on May 23, 2003.
Application No. 10/444,853 is a continuation-in-part of application No. PCT/US03/05346, filed on Feb. 20, 2003.
Application No. 10/444,853 is a continuation-in-part of application No. PCT/US03/05028, filed on Feb. 20, 2003.
(63) Continuation-in-part of application No. PCT/US04/13456, filed on Apr. 30, 2004.
Application No. PCT/US04/13456 is a continuation-in-part of application No. 10/780,447, filed on Feb. 13, 2004.
Application No. 10/780,447 is a continuation-in-part of application No. 10/427,160, filed on Apr. 30, 2003.
Application No. 10/427,160 is a continuation-in-part of application No. PCT/US02/15876, filed on May 17, 2002.
(63) Continuation-in-part of application No. 10/727,780, filed on Dec. 3, 2003.
(63) Continuation-in-part of application No. PCT/US05/04270, filed on Feb. 9, 2005.
(60) Provisional application No. 60/358,580, filed on Feb. 20, 2002.
(60) Provisional application No. 60/358,580, filed on Feb. 20, 2002.
(60) Provisional application No. 60/363,124, filed on Mar. 11, 2002.
(60) Provisional application No. 60/363,124, filed on Mar. 11, 2002.
(60) Provisional application No. 60/386,782, filed on Jun. 6, 2002.
(60) Provisional application No. 60/386,782, filed on Jun. 6, 2002.
(60) Provisional application No. 60/406,784, filed on Aug. 29, 2002.
(60) Provisional application No. 60/406,784, filed on Aug. 29, 2002.
(60) Provisional application No. 60/408,378, filed on Sep. 5, 2002.
(60) Provisional application No. 60/408,378, filed on Sep. 5, 2002.
(60) Provisional application No. 60/409,293, filed on Sep. 9, 2002.
(60) Provisional application No. 60/409,293, filed on Sep. 9, 2002.
(60) Provisional application No. 60/440,129, filed on Jan. 15, 2003.
(60) Provisional application No. 60/440,129, filed on Jan. 15, 2003.
(60) Provisional application No. 60/292,217, filed on May 18, 2001.
(60) Provisional application No. 60/362,016, filed on Mar. 6, 2002.
(60) Provisional application No. 60/306,883, filed on Jul. 20, 2001.
(60) Provisional application No. 60/311,865, filed on Aug. 13, 2001.
(60) Provisional application No. 60/543,480, filed on Feb. 10, 2004.

(51) Int. Cl. A61K 48/00; C07H 21/02

(52) U.S. Cl. 514/44; 536/23.1

(57) ABSTRACT

This invention relates to compounds, compositions, and methods useful for modulating histone deacetylase (HDAC) gene expression using short interfering nucleic acid (siNA) molecules. In particular, the instant invention features small nucleic acid molecules, such as short interfering nucleic acid (siNA), short interfering RNA (siRNA), double-stranded RNA (dsRNA), micro-RNA (miRNA), and short hairpin RNA (shRNA) molecules and methods used to modulate the expression of HDAC genes, such as HDAC genes associated with the maintenance or development of diseases, disorders, traits, and conditions in a subject or organism such as cancer, proliferative disease, and age related disease.

[0001] This application is a continuation-in-part of U.S. patent application Ser. No. 11/098,303, filed Apr. 4, 2005, which is a continuation-in-part of U.S. patent application Ser. No. 10/923,536, filed Aug. 20, 2004, which is a continuation-in-part of International Patent Application No. PCT/US04/16390, filed May 24, 2004, which is a continuation-in-part of U.S. patent application Ser. No. 10/826,966, filed Apr. 16, 2004, which is continuation-in-part of U.S. patent application Ser. No. 10/757,803, filed Jan. 14, 2004, which is a continuation-in-part of U.S. patent application Ser. No. 10/720,448, filed Nov. 24, 2003, which is a continuation-in-part of U.S. patent application Ser. No. 10/693,059, filed Oct. 23, 2003, which is a continuation-in-part of U.S. patent application Ser. No. 10/444,853, filed May 23, 2003, which is a continuation-in-part of International Patent Application No. PCT/US03/05346, filed Feb. 20, 2003, and a continuation-in-part of International Patent Application No. PCT/US03/05028, filed Feb. 20, 2003, both of which claim the benefit of U.S. Provisional Application No. 60/358,580 filed Feb. 20, 2002, U.S. Provisional Application No. 60/363,124 filed Mar. 11, 2002, U.S. Provisional Application No. 60/386,782 filed Jun. 6, 2002, U.S. Provisional Application No. 60/406,784 filed Aug. 29, 2002, U.S. Provisional Application No. 60/408,378 filed Sep. 5, 2002, U.S. Provisional Application No. 60/409,293 filed Sep. 9, 2002, and U.S. Provisional Application No. 60/440,129 filed Jan. 15, 2003. This application is also a continuation-in-part of International Patent Application No. PCT/US04/13456, filed Apr. 30, 2004, which is a continuation-in-part of U.S. patent application Ser. No. 10/780,447, filed Feb. 13, 2004, which is a continuation-in-part of U.S. patent application Ser. No. 10/427,160, filed Apr. 30, 2003, which is a continuation-in-part of International Patent Application No. PCT/US02/15876 filed May 17, 2002, which claims the benefit of U.S. Provisional Application No. 60/292,217, filed May 18, 2001, U.S. Provisional Application No. 60/362,016, filed Mar. 6, 2002, U.S. Provisional Application No. 60/306,883, filed Jul. 20, 2001, and U.S. Provisional Application No. 60/311,865, filed Aug. 13, 2001. This application is also a continuation-in-part of U.S. patent application Ser. No. 10/727,780 filed Dec. 3, 2003. This application is also a continuation-in-part of International Patent Application No. PCT/US05/04270 filed Feb. 9, 2005, which claims the benefit of U.S. Provisional Application No. 60/543,480, filed Feb. 10, 2004. The instant application claims the benefit of all the listed applications, which are hereby incorporated by reference herein in their entireties, including the drawings.

### FIELD OF THE INVENTION

[0002] The present invention relates to compounds, compositions, and methods for the study, diagnosis, and treatment of traits, diseases and conditions that respond to the modulation of histone deacetylase (HDAC) gene expression and/or activity. The present invention is also directed to compounds, compositions, and methods relating to traits, diseases and conditions that respond to the modulation of expression and/or activity of genes involved in HDAC gene expression pathways or other cellular processes that mediate the maintenance or development of such traits, diseases and conditions. Specifically, the invention relates to small nucleic acid molecules, such as short interfering nucleic acid (siNA), short interfering RNA (siRNA), double-stranded RNA (dsRNA), micro-RNA (miRNA), and short hairpin RNA (shRNA) molecules capable of mediating or that mediate RNA interference (RNAi) against gene expression. Such small nucleic acid molecules are useful, for example, in providing compositions for treatment of traits, diseases and conditions that can respond to modulation of HDAC gene expression in a subject or organism, such as cancer and other proliferative diseases or conditions that are associated with HDAC gene expression or activity.

### BACKGROUND OF THE INVENTION

[0003] The following is a discussion of relevant art pertaining to RNAi. The discussion is provided only for understanding of the invention that follows. The summary is not an admission that any of the work described below is prior art to the claimed invention.

[0004] RNA interference refers to the process of sequence-specific post-transcriptional gene silencing in animals mediated by short interfering RNAs (siRNAs) (Zamore et al., 2000, Cell, 101, 25-33; Fire et al., 1998, Nature, 391, 806; Hamilton et al., 1999, Science, 286, 950-951; Lin et al., 1999, Nature, 402, 128-129; Sharp, 1999, Genes & Dev., 13:139-141; and Strauss, 1999, Science, 286, 886). The corresponding process in plants (Heifetz et al., International PCT Publication No. WO 99/61631) is commonly referred to as post-transcriptional gene silencing or RNA silencing and is also referred to as quelling in fungi. The process of post-transcriptional gene silencing is thought to be an evolutionarily-conserved cellular defense mechanism used to prevent the expression of foreign genes and is commonly shared by diverse flora and phyla (Fire et al., 1999, Trends Genet., 15, 358). Such protection from foreign gene expression may have evolved in response to the production of double-stranded RNAs (dsRNAs) derived from viral infection or from the random integration of transposon elements into a host genome via a cellular response that specifically destroys homologous single-stranded RNA or viral genomic RNA. The presence of dsRNA in cells triggers the RNAi response through a mechanism that has yet to be fully characterized. This mechanism appears to be different from other known mechanisms involving double stranded RNA-specific ribonucleases, such as the interferon response that results from dsRNA-mediated activation of protein kinase PKR and 2′,5′-oligoadenylate synthetase resulting in non-specific cleavage of mRNA by ribonuclease L (see for example U.S. Pat. Nos. 6,107,094; 5,898,031; Clemens et al., 1997, J. Interferon & Cytokine Res., 17, 503-524; Adah et al., 2001, Curr. Med. Chem., 8, 1189).

[0005] The presence of long dsRNAs in cells stimulates the activity of a ribonuclease III enzyme referred to as dicer (Bass, 2000, Cell, 101, 235; Zamore et al., 2000, Cell, 101, 25-33; Hammond et al., 2000, Nature, 404, 293). Dicer is involved in the processing of the dsRNA into short pieces of dsRNA known as short interfering RNAs (siRNAs) (Zamore et al., 2000, Cell, 101, 25-33; Bass, 2000, Cell, 101, 235; Berstein et al., 2001, Nature, 409, 363). Short interfering RNAs derived from dicer activity are typically about 21 to about 23 nucleotides in length and comprise about 19 base pair duplexes (Zamore et al., 2000, Cell, 101, 25-33; Elbashir et al., 2001, Genes Dev., 15, 188). Dicer has also been implicated in the excision of 21- and 22-nucleotide small temporal RNAs (stRNAs) from precursor RNA of conserved structure that are implicated in translational control (Hutvagner et al., 2001, Science, 293, 834). The RNAi response also features an endonuclease complex, commonly referred to as an RNA-induced silencing complex (RISC), which mediates cleavage of single-stranded RNA having sequence complementary to the antisense strand of the siRNA duplex. Cleavage of the target RNA takes place in the middle of the region complementary to the antisense strand of the siRNA duplex (Elbashir et al., 2001, Genes Dev., 15, 188).

[0006] RNAi has been studied in a variety of systems. Fire et al., 1998, Nature, 391, 806, were the first to observe RNAi in C. elegans. Bahramian and Zarbl, 1999, Molecular and Cellular Biology, 19, 274-283 and Wianny and Goetz, 1999, Nature Cell Biol., 2, 70, describe RNAi mediated by dsRNA in mammalian systems. Hammond et al., 2000, Nature, 404, 293, describe RNAi in Drosophila cells transfected with dsRNA. Elbashir et al., 2001, Nature, 411, 494 and Tuschl et al., International PCT Publication No. WO 01/75164, describe RNAi induced by introduction of duplexes of synthetic 21-nucleotide RNAs in cultured mammalian cells including human embryonic kidney and HeLa cells. Recent work in Drosophila embryonic lysates (Elbashir et al., 2001, EMBO J., 20, 6877 and Tuschl et al., International PCT Publication No. WO 01/75164) has revealed certain requirements for siRNA length, structure, chemical composition, and sequence that are essential to mediate efficient RNAi activity. These studies have shown that 21-nucleotide siRNA duplexes are most active when containing 3′-terminal dinucleotide overhangs. Furthermore, complete substitution of one or both siRNA strands with 2′-deoxy (2′-H) or 2′-O-methyl nucleotides abolishes RNAi activity, whereas substitution of the 3′-terminal siRNA overhang nucleotides with 2′-deoxy nucleotides (2′-H) was shown to be tolerated. Single mismatch sequences in the center of the siRNA duplex were also shown to abolish RNAi activity. In addition, these studies also indicate that the position of the cleavage site in the target RNA is defined by the 5′-end of the siRNA guide sequence rather than the 3′-end of the guide sequence (Elbashir et al., 2001, EMBO J., 20, 6877). Other studies have indicated that a 5′-phosphate on the target-complementary strand of a siRNA duplex is required for siRNA activity and that ATP is utilized to maintain the 5′-phosphate moiety on the siRNA (Nykanen et al., 2001, Cell, 107, 309).

[0007] Studies have shown that replacing the 3′-terminal nucleotide overhanging segments of a 21-mer siRNA duplex having two-nucleotide 3′-overhangs with deoxyribonucleotides does not have an adverse effect on RNAi activity. Replacing up to four nucleotides on each end of the siRNA with deoxyribonucleotides has been reported to be well tolerated, whereas complete substitution with deoxyribonucleotides results in no RNAi activity (Elbashir et al., 2001, EMBO J., 20, 6877 and Tuschl et al., International PCT Publication No. WO 01/75164). In addition, Elbashir et al., supra, also report that substitution of siRNA with 2′-O-methyl nucleotides completely abolishes RNAi activity. Li et al., International PCT Publication No. WO 00/44914, and Beach et al., International PCT Publication No. WO 01/68836 preliminarily suggest that siRNA may include modifications to either the phosphate-sugar backbone or the nucleoside to include at least one of a nitrogen or sulfur heteroatom, however, neither application postulates to what extent such modifications would be tolerated in siRNA molecules, nor provides any further guidance or examples of such modified siRNA. Kreutzer et al., Canadian Patent Application No. 2,359,180, also describe certain chemical modifications for use in dsRNA constructs in order to counteract activation of double-stranded RNA-dependent protein kinase PKR, specifically 2′-amino or 2′-O-methyl nucleotides, and nucleotides containing a 2′-O or 4′-C methylene bridge. However, Kreutzer et al. similarly fails to provide examples or guidance as to what extent these modifications would be tolerated in dsRNA molecules.

[0008] Parrish et al., 2000, Molecular Cell, 6, 1077-1087, tested certain chemical modifications targeting the unc-22 gene in C. elegans using long (>25 nt) siRNA transcripts. The authors describe the introduction of thiophosphate residues into these siRNA transcripts by incorporating thiophosphate nucleotide analogs with T7 and T3 RNA polymerase and observed that RNAs with two phosphorothioate modified bases also had substantial decreases in effectiveness as RNAi. Further, Parrish et al. reported that phosphorothioate modification of more than two residues greatly destabilized the RNAs in vitro such that interference activities could not be assayed. Id. at 1081. The authors also tested certain modifications at the 2′-position of the nucleotide sugar in the long siRNA transcripts and found that substituting deoxynucleotides for ribonucleotides produced a substantial decrease in interference activity, especially in the case of Uridine to Thymidine and/or Cytidine to deoxy-Cytidine substitutions. Id. In addition, the authors tested certain base modifications, including substituting, in sense and antisense strands of the siRNA, 4-thiouracil, 5-bromouracil, 5-iodouracil, and 3-(aminoallyl)uracil for uracil, and inosine for guanosine. Whereas 4-thiouracil and 5-bromouracil substitution appeared to be tolerated, Parrish reported that inosine produced a substantial decrease in interference activity when incorporated in either strand. Parrish also reported that incorporation of 5-iodouracil and 3-(aminoallyl)uracil in the antisense strand resulted in a substantial decrease in RNAi activity as well.

[0009] The use of longer dsRNA has been described. For example, Beach et al., International PCT Publication No. WO 01/68836, describes specific methods for attenuating gene expression using endogenously-derived dsRNA. Tuschl et al., International PCT Publication No. WO 01/75164, describe a Drosophila in vitro RNAi system and the use of specific siRNA molecules for certain functional genomic and certain therapeutic applications; although Tuschl, 2001, Chem. Biochem., 2, 239-245, doubts that RNAi can be used to cure genetic diseases or viral infection due to the danger of activating interferon response. Li et al., International PCT Publication No. WO 00/44914, describe the use of specific long (141 bp-488 bp) enzymatically synthesized or vector expressed dsRNAs for attenuating the expression of certain target genes. Zernicka-Goetz et al., International PCT Publication No. WO 01/36646, describe certain methods for inhibiting the expression of particular genes in mammalian cells using certain long (550 bp-714 bp), enzymatically synthesized or vector expressed dsRNA molecules. Fire et al., International PCT Publication No. WO 99/32619, describe particular methods for introducing certain long dsRNA molecules into cells for use in inhibiting gene expression in nematodes. Plaetinck et al., International PCT Publication No. WO 00/01846, describe certain methods for identifying specific genes responsible for conferring a particular phenotype in a cell using specific long dsRNA molecules. Mello et al., International PCT Publication No. WO 01/29058, describe the identification of specific genes involved in dsRNA-mediated RNAi. Pachuck et al., International PCT Publication No. WO 00/63364, describe certain long (at least 200 nucleotide) dsRNA constructs. Deschamps Depaillette et al., International PCT Publication No. WO 99/07409, describe specific compositions consisting of particular dsRNA molecules combined with certain anti-viral agents. Waterhouse et al., International PCT Publication No. 99/53050 and 1998, PNAS, 95, 13959-13964, describe certain methods for decreasing the phenotypic expression of a nucleic acid in plant cells using certain dsRNAs. Driscoll et al., International PCT Publication No. WO 01/49844, describe specific DNA expression constructs for use in facilitating gene silencing in targeted organisms.

[0010] Others have reported on various RNAi and gene-silencing systems. For example, Parrish et al., 2000, Molecular Cell, 6, 1077-1087, describe specific chemically-modified dsRNA constructs targeting the unc-22 gene of C. elegans. Grossniklaus, International PCT Publication No. WO 01/38551, describes certain methods for regulating polycomb gene expression in plants using certain dsRNAs. Churikov et al., International PCT Publication No. WO 01/42443, describe certain methods for modifying genetic characteristics of an organism using certain dsRNAs. Cogoni et al, International PCT Publication No. WO 01/53475, describe certain methods for isolating a Neurospora silencing gene and uses thereof. Reed et al., International PCT Publication No. WO 01/68836, describe certain methods for gene silencing in plants. Honer et al., International PCT Publication No. WO 01/70944, describe certain methods of drug screening using transgenic nematodes as Parkinson's Disease models using certain dsRNAs. Deak et al., International PCT Publication No. WO 01/72774, describe certain Drosophila-derived gene products that may be related to RNAi in Drosophila. Arndt et al., International PCT Publication No. WO 01/92513 describe certain methods for mediating gene suppression by using factors that enhance RNAi. Tuschl et al., International PCT Publication No. WO 02/44321, describe certain synthetic siRNA constructs. Pachuk et al., International PCT Publication No. WO 00/63364, and Satishchandran et al., International PCT Publication No. WO 01/04313, describe certain methods and compositions for inhibiting the function of certain polynucleotide sequences using certain long (over 250 bp), vector expressed dsRNAs. Echeverri et al., International PCT Publication No. WO 02/38805, describe certain C. elegans genes identified via RNAi. Kreutzer et al., International PCT Publications Nos. WO 02/055692, WO 02/055693, and EP 1144623 B1 describes certain methods for inhibiting gene expression using dsRNA. Graham et al., International PCT Publications Nos. WO 99/49029 and WO 01/70949, and AU 4037501 describe certain vector expressed siRNA molecules. Fire et al., U.S. Pat. No. 6,506,559, describe certain methods for inhibiting gene expression in vitro using certain long dsRNA (299 bp-1033 bp) constructs that mediate RNAi. Martinez et al., 2002, Cell, 110, 563-574, describe certain single stranded siRNA constructs, including certain 5′-phosphorylated single stranded siRNAs that mediate RNA interference in Hela cells. Harborth et al., 2003, Antisense & Nucleic Acid Drug Development, 13, 83-105, describe certain chemically and structurally modified siRNA molecules. Chiu and Rana, 2003, RNA, 9, 1034-1048, describe certain chemically and structurally modified siRNA molecules. Woolf et al., International PCT Publication Nos. WO 03/064626 and WO 03/064625 describe certain chemically modified dsRNA constructs. Hornung et al., 2005, Nature Medicine, 11, 263-270, describe the sequence-specific potent induction of IFN-alpha by short interfering RNA in plasmacytoid dendritic cells through TLR7. Judge et al., 2005, Nature Biotechnology, Published online: 20 Mar. 2005, describe the sequence-dependent stimulation of the mammalian innate immune response by synthetic siRNA. Yuki et al., International PCT Publication Nos. WO 05/049821 and WO 04/048566, describe certain methods for designing short interfering RNA sequences and certain short interfering RNA sequences with optimized activity. Saigo et al., US Patent Application Publication No. US20040539332, describe certain methods of designing oligo- or polynucleotide sequences, including short interfering RNA sequences, for achieving RNA interference. Tei et al., International PCT Publication No. WO 03/044188, describe certain methods for inhibiting expression of a target gene, which comprises transfecting a cell, tissue, or individual organism with a double-stranded polynucleotide comprising DNA and RNA having a substantially identical nucleotide sequence with at least a partial nucleotide sequence of the target gene. Curtin and Glaser, 2003, Curr. Med. Chem., 10, 2372-92, describe certain siRNAs targeting HDACs. Filocamo et al., International PCT Publication No. WO 05/071079, describe certain siRNA molecules targeting HDAC 11.

### SUMMARY OF THE INVENTION

[0011] This invention relates to compounds, compositions, and methods useful for modulating histone deacetylase (HCAC) gene expression using short interfering nucleic acid (siNA) molecules. This invention also relates to compounds, compositions, and methods useful for modulating the expression and activity of other genes involved in pathways of HDAC gene expression and/or activity by RNA interference (RNAi) using small nucleic acid molecules. In particular, the instant invention features small nucleic acid molecules, such as short interfering nucleic acid (siNA), short interfering RNA (siRNA), double-stranded RNA (dsRNA), micro-RNA (miRNA), and short hairpin RNA (shRNA) molecules and methods used to modulate the expression of HDAC genes.

[0012] A siNA of the invention can be unmodified or chemically-modified. A siNA of the instant invention can be chemically synthesized, expressed from a vector or enzymatically synthesized. The instant invention also features various chemically-modified synthetic short interfering nucleic acid (siNA) molecules capable of modulating HDAC gene expression or activity in cells by RNA interference (RNAi). The use of chemically-modified siNA improves various properties of native siNA molecules through increased resistance to nuclease degradation in vivo and/or through improved cellular uptake. Further, contrary to earlier published studies, siNA having multiple chemical modifications retains its RNAi activity. The siNA molecules of the instant invention provide useful reagents and methods for a variety of therapeutic, cosmetic, veterinary, diagnostic, target validation, genomic discovery, genetic engineering, and pharmacogenomic applications.

[0013] In one embodiment, the invention features one or more siNA molecules and methods that independently or in combination modulate the expression of HDAC genes encoding proteins, such as HDAC proteins that are associated with the maintenance and/or development of cancer or proliferative diseases or conditions in a subject or organism, including genes encoding sequences comprising those sequences referred to by GenBank Accession Nos. shown in Table I, referred to herein generally as HDAC. The description below of the various aspects and embodiments of the invention is provided with reference to exemplary HDAC genes (e.g., HDAC 1, HDAC 2, HCAC 3, HDAC 4, HDAC 5, HDAC 6, HDAC 7, HDAC 8, HDAC 9a, HDAC 9b, HDAC 10, and/or HDAC 11, and/or SIR T1, 2, 3, 4, 5, 6, and/or 7). Such genes are involved in histone deacetylase activity and associaated epigenetic transcriptional silencing activity via maintenance of heterochromatin (see for example Acharya et al., 2005, Molecular Pharmacology Fast Forward, June 14, 1-49). However, the various aspects and embodiments are also directed to other histone deacetylase genes, such as HDAC homolog genes and transcript variants and polymorphisms (e.g., single nucleotide polymorphism, (SNPs)) associated with certain HDAC genes. As such, the various aspects and embodiments are also directed to other genes that are involved in HDAC mediated pathways of signal transduction or gene expression that are involved, for example, in the maintenance and/or development of conditions or disease states such as cancer and proliferative disease in a subject or organism. These additional genes can be analyzed for target sites using the methods described for HDAC genes herein. Thus, the modulation of other genes and the effects of such modulation of the other genes can be performed, determined, and measured as described herein.

[0014] In one embodiment, the invention features a double stranded nucleic acid molecule, such as an siNA molecule, where one of the strands comprises nucleotide sequence having complementarity to a predetermined HDAC nucleotide sequence in a target HDAC nucleic acid molecule, or a portion thereof. In one embodiment, the predetermined HDAC nucleotide sequence is a HDAC nucleotide target sequence described herein. In another embodiment, the predetermined HDAC nucleotide sequence is a HDAC target sequence as is known in the art.

[0015] In one embodiment, the invention features a double-stranded short interfering nucleic acid (siNA) molecule that down-regulates expression of a target HDAC gene or that directs cleavage of a target RNA, wherein said siNA molecule comprises about 15 to about 28 base pairs.

[0016] In one embodiment, the invention features a double-stranded short interfering nucleic acid (siNA) molecule that directs cleavage of a target HDAC RNA, wherein said siNA molecule comprises about 15 to about 28 base pairs.

[0017] In one embodiment, the invention features a double stranded short interfering nucleic acid (siNA) molecule that directs cleavage of a target HDAC RNA via RNA interference (RNAi), wherein the double stranded siNA molecule comprises a first and a second strand, each strand of the siNA molecule is about 15 to about 30 nucleotides in length, the first strand of the siNA molecule comprises nucleotide sequence having sufficient complementarity to the target HDAC RNA for the siNA molecule to direct cleavage of the target HDAC RNA via RNA interference, and the second strand of said siNA molecule comprises nucleotide sequence that is complementary to the first strand.

[0018] In one embodiment, the invention features a double stranded short interfering nucleic acid (siNA) molecule that directs cleavage of a target HDAC RNA via RNA interference (RNAi), wherein the double stranded siNA molecule comprises a first and a second strand, each strand of the siNA molecule is about 18 to about 23 nucleotides in length, the first strand of the siNA molecule comprises nucleotide sequence having sufficient complementarity to the target HDAC RNA for the siNA molecule to direct cleavage of the target HDAC RNA via RNA interference, and the second strand of said siNA molecule comprises nucleotide sequence that is complementary to the first strand.

[0019] In one embodiment, the invention features a chemically synthesized double stranded short interfering nucleic acid (siNA) molecule that directs cleavage of a target HDAC RNA via RNA interference (RNAi), wherein each strand of the siNA molecule is about 15 to about 30 nucleotides in length; and one strand of the siNA molecule comprises nucleotide sequence having sufficient complementarity to the target HDAC RNA for the siNA molecule to direct cleavage of the target HDAC RNA via RNA interference.

[0020] In one embodiment, the invention features a chemically synthesized double stranded short interfering nucleic acid (siNA) molecule that directs cleavage of a target HDAC RNA via RNA interference (RNAi), wherein each strand of the siNA molecule is about 18 to about 23 nucleotides in length; and one strand of the siNA molecule comprises nucleotide sequence having sufficient complementarity to the target HDAC RNA for the siNA molecule to direct cleavage of the target RNA via RNA interference.

[0021] In one embodiment, the invention features a siNA molecule that down-regulates expression of a target HDAC gene or that directs cleavage of a target HDAC RNA, for example, wherein the target HDAC gene or RNA comprises protein encoding sequence. In one embodiment, the invention features a siNA molecule that down-regulates expression of a target HDAC gene or that directs cleavage of a target HDAC RNA, for example, wherein the target HDAC gene or RNA comprises non-coding sequence or regulatory elements involved in target HDAC gene expression (e.g., non-coding RNA).

[0022] In one embodiment, a siNA of the invention is used to inhibit the expression of target HDAC genes or a target HDAC gene family, wherein the HDAC genes or HDAC gene family sequences share sequence homology. Such homologous sequences can be identified as is known in the art, for example using sequence alignments. siNA molecules can be designed to target such homologous HDAC sequences, for example using perfectly complementary sequences or by incorporating non-canonical base pairs, for example mismatches and/or wobble base pairs, that can provide additional target sequences. In instances where mismatches are identified, non-canonical base pairs (for example, mismatches and/or wobble bases) can be used to generate siNA molecules that target more than one gene sequence. In a non-limiting example, non-canonical base pairs such as UU and CC base pairs are used to generate siNA molecules that are capable of targeting sequences for differing polynucleotide targets that share sequence homology. As such, one advantage of using siNAs of the invention is that a single siNA can be designed to include nucleic acid sequence that is complementary to the nucleotide sequence that is conserved between the homologous genes. In this approach, a single siNA can be used to inhibit expression of more than one gene instead of using more than one siNA molecule to target the different genes.

[0023] In one embodiment, the invention features siNA molecules that target conserved HDAC nucleotide sequences. The conserved HDAC sequences can be conserved across class I HDAC targets (e.g., any of HDAC 1, 2, 3 and/or 8), class II HDAC targets (e.g., any of HDAC 4, 5, 6, 7, 9a, 9b, and/or 10), class III targets (SIR T1, 2, 3, 4, 5, 6, and/or 7), or any combination thereof (e.g., any of HDAC 1, 2, 3, 4, 5, 6, 7, 8, 9a, 9b, 10, and/or 11, and/or SIR T1, 2, 3, 4, 5, 6, and/or 7).

[0024] In one embodiment, the invention features a siNA molecule having RNAi activity against target HDAC RNA (e.g., coding or non-coding RNA), wherein the siNA molecule comprises a sequence complementary to any HDAC RNA sequence, such as those sequences having HDAC GenBank Accession Nos. shown in Table I, or in U.S. Ser. No. 10/923,536 and U.S. Ser. No. 10/923,536, both incorporated by reference herein. In another embodiment, the invention features a siNA molecule having RNAi activity against target HDAC RNA, wherein the siNA molecule comprises a sequence complementary to an RNA having HDAC variant encoding sequence, for example other mutant HDAC genes known in the art to be associated with the maintenance and/or development of diseases, traits, disorders, and/or conditions described herein (e.g., cancer and proliferative diseases) or otherwise known in the art. Chemical modifications as shown in Table IV or otherwise described herein can be applied to any siNA construct of the invention. In another embodiment, a siNA molecule of the invention includes a nucleotide sequence that can interact with nucleotide sequence of a target HDAC gene and thereby mediate silencing of target HDAC gene expression, for example, wherein the siNA mediates regulation of target HDAC gene expression by cellular processes that modulate the chromatin structure or methylation patterns of the target gene and prevent transcription of the target HDAC gene.

[0025] In one embodiment, siNA molecules of the invention are used to down regulate or inhibit the expression of HDAC proteins arising from haplotype polymorphisms that are associated with a trait, disease or condition in a subject or organism, such as cancer or proliferative diseases and conditions. Analysis of HDAC genes, or HDAC protein or RNA levels can be used to identify subjects with such polymorphisms or those subjects who are at risk of developing traits, conditions, or diseases described herein. These subjects are amenable to treatment, for example, treatment with siNA molecules of the invention and any other composition useful in treating diseases related to target gene expression. As such, analysis of HDAC protein or RNA levels can be used to determine treatment type and the course of therapy in treating a subject. Monitoring of HDAC protein or RNA levels can be used to predict treatment outcome and to determine the efficacy of compounds and compositions that modulate the level and/or activity of certain HDAC proteins associated with a trait, disorder, condition, or disease (e.g., cancer and/or proliferative diseases and conditions).

[0026] In one embodiment of the invention a siNA molecule comprises an antisense strand comprising a nucleotide sequence that is complementary to a target HDAC nucleotide sequence or a portion thereof. The siNA further comprises a sense strand, wherein said sense strand comprises a nucleotide sequence of a target HDAC gene or a portion thereof.

[0027] In another embodiment, a siNA molecule comprises an antisense region comprising a nucleotide sequence that is complementary to a nucleotide sequence encoding a target HDAC protein or a portion thereof. The siNA molecule further comprises a sense region, wherein said sense region comprises a nucleotide sequence of a target HDAC gene or a portion thereof.

[0028] In another embodiment, the invention features a siNA molecule comprising nucleotide sequence, for example, nucleotide sequence in the antisense region of the siNA molecule that is complementary to a nucleotide sequence or portion of sequence of a target HDAC gene. In another embodiment, the invention features a siNA molecule comprising a region, for example, the antisense region of the siNA construct, complementary to a sequence comprising a target HDAC gene sequence or a portion thereof.

[0029] In yet another embodiment, the invention features a siNA molecule comprising a sequence, for example, the antisense sequence of the siNA construct, complementary to a sequence or portion of sequence comprising sequence represented by GenBank Accession Nos. shown in Table I or in U.S. Ser. No. 10/923,536 and U.S. Ser. No. 10/923,536, both incorporated by reference herein. Chemical modifications in Table IV and otherwise described herein can be applied to any siNA construct of the invention.

[0030] In one embodiment of the invention a siNA molecule comprises an antisense strand having about 15 to about 30 (e.g., about 15, 16, 17, 18, 19, 20, 21, 22, 23, 24, 25, 26, 27, 28, 29, or 30) nucleotides, wherein the antisense strand is complementary to a target HDAC RNA sequence or a portion thereof, and wherein said siNA further comprises a sense strand having about 15 to about 30 (e.g., about 15, 16, 17, 18, 19, 20, 21, 22, 23, 24, 25, 26, 27, 28, 29, or 30) nucleotides, and wherein said sense strand and said antisense strand are distinct nucleotide sequences where at least about 15 nucleotides in each strand are complementary to the other strand.

[0031] In another embodiment of the invention a siNA molecule of the invention comprises an antisense region having about 15 to about 30 (e.g., about 15, 16, 17, 18, 19, 20, 21, 22, 23, 24, 25, 26, 27, 28, 29, or 30) nucleotides, wherein the antisense region is complementary to a target HDAC DNA sequence, and wherein said siNA further comprises a sense region having about 15 to about 30 (e.g., about 15, 16, 17, 18, 19, 20, 21, 22, 23, 24, 25, 26, 27, 28, 29, or 30) nucleotides, wherein said sense region and said antisense region are comprised in a linear molecule where the sense region comprises at least about 15 nucleotides that are complementary to the antisense region.

[0032] In one embodiment, a siNA molecule of the invention has RNAi activity that modulates expression of HDAC RNA encoded by one or more HDAC genes. Because various HDAC genes can share some degree of sequence homology with each other, siNA molecules can be designed to target a class of HDAC genes (e.g., class I, class II, and/or class III HDAC genes) or alternately specific genes (e.g., any of HDAC 1, 2, 3, 4, 5, 6, 7, 8, 9a, 9b, 10, and/or 11, and/or SIR T1, 2, 3, 4, 5, 6 and/or 7 or polymorphic variants thereof) by selecting sequences that are either shared amongst different HDAC gene targets or alternatively that are unique for a specific HDAC gene target. Therefore, in one embodiment, the siNA molecule can be designed to target conserved regions of target HDAC RNA sequences having homology among several gene variants so as to target a class of HDAC genes with one siNA molecule. Accordingly, in one embodiment, the siNA molecule of the invention modulates the expression of one or both HDAC gene alleles in a subject. In another embodiment, the siNA molecule can be designed to target a sequence that is unique to a specific target HDAC RNA sequence (e.g., a single allele or single nucleotide polymorphism (SNP)) due to the high degree of specificity that the siNA molecule requires to mediate RNAi activity.

[0033] In one embodiment, nucleic acid molecules of the invention that act as mediators of the RNA interference gene silencing response are double-stranded nucleic acid molecules. In another embodiment, the siNA molecules of the invention consist of duplex nucleic acid molecules containing about 15 to about 30 base pairs between oligonucleotides comprising about 15 to about 30 (e.g., about 15, 16, 17, 18, 19, 20, 21, 22, 23, 24, 25, 26, 27, 28, 29, or 30) nucleotides. In yet another embodiment, siNA molecules of the invention comprise duplex nucleic acid molecules with overhanging ends of about 1 to about 3 (e.g., about 1, 2, or 3) nucleotides, for example, about 21-nucleotide duplexes with about 19 base pairs and 3′-terminal mononucleotide, dinucleotide, or trinucleotide overhangs. In yet another embodiment, siNA molecules of the invention comprise duplex nucleic acid molecules with blunt ends, where both ends are blunt, or alternatively, where one of the ends is blunt.

[0034] In one embodiment, the invention features one or more chemically-modified siNA constructs having specificity for target HDAC nucleic acid molecules, such as HDAC DNA, or HDAC RNA encoding a HDAC protein or non-coding RNA associated with the expression of target HDAC genes.

[0035] In one embodiment, the invention features a RNA based siNA molecule (e.g., a siNA comprising 2′-OH nucleotides) having specificity for nucleic acid molecules that includes one or more chemical modifications described herein. Non-limiting examples of such chemical modifications include without limitation phosphorothioate internucleotide linkages, 2′-deoxyribonucleotides, 2′-O-methyl ribonucleotides, 2′-deoxy-2′-fluoro ribonucleotides, 4′-thio ribonucleotides, 2′-O-trifluoromethyl nucleotides, 2′-O-ethyl-trifluoromethoxy nucleotides, 2′-O-difluoromethoxy-ethoxy nucleotides (see for example U.S. Ser. No. 10/981,966 filed Nov. 5, 2004, incorporated by reference herein), “universal base” nucleotides, “acyclic” nucleotides, 5-C-methyl nucleotides, and terminal glyceryl and/or inverted deoxy abasic residue incorporation. These chemical modifications, when used in various siNA constructs, (e.g., RNA based siNA constructs), are shown to preserve RNAi activity in cells while at the same time, dramatically increasing the serum stability of these compounds. Furthermore, contrary to the data published by Parrish et al., supra, applicant demonstrates that multiple (greater than one) phosphorothioate substitutions are well-tolerated and confer substantial increases in serum stability for modified siNA constructs.

[0036] In one embodiment, a siNA molecule of the invention comprises modified nucleotides while maintaining the ability to mediate RNAi. The modified nucleotides can be used to improve in vitro or in vivo characteristics such as stability, activity, toxicity, immune response, and/or bioavailability. For example, a siNA molecule of the invention can comprise modified nucleotides as a percentage of the total number of nucleotides present in the siNA molecule. As such, a siNA molecule of the invention can generally comprise about 5% to about 100% modified nucleotides (e.g., about 5%, 10%, 15%, 20%, 25%, 30%, 35%, 40%, 45%, 50%, 55%, 60%, 65%, 70%, 75%, 80%, 85%, 90%, 95% or 100% modified nucleotides). For example, in one embodiment, between about 5% to about 100% (e.g., about 5%, 10%, 15%, 20%, 25%, 30%, 35%, 40%, 45%, 50%, 55%, 60%, 65%, 70%, 75%, 80%, 85%, 90%, 95% or 100% modified nucleotides) of the nucleotide positions in a siNA molecule of the invention comprise a nucleic acid sugar modification, such as a 2′-sugar modification, e.g., 2′-O-methyl nucleotides, 2′-deoxy-2′-fluoro nucleotides, 2′-O-methoxyethyl nucleotides, 2′-O-trifluoromethyl nucleotides, 2′-O-ethyl-trifluoromethoxy nucleotides, 2′-O-difluoromethoxy-ethoxy nucleotides, or 2′-deoxy nucleotides. In another embodiment, between about 5% to about 100% (e.g., about 5%, 10%, 15%, 20%, 25%, 30%, 35%, 40%, 45%, 50%, 55%, 60%, 65%, 70%, 75%, 80%, 85%, 90%, 95% or 100% modified nucleotides) of the nucleotide positions in a siNA molecule of the invention comprise a nucleic acid base modification, such as inosine, purine, pyridin-4-one, pyridin-2-one, phenyl, pseudouracil, 2,4,6-trimethoxy benzene, 3-methyl uracil, dihydrouridine, naphthyl, aminophenyl, 5-alkylcytidines (e.g., 5-methylcytidine), 5-alkyluridines (e.g., ribothymidine), 5-halouridine (e.g., 5-bromouridine) or 6-azapyrimidines or 6-alkylpyrimidines (e.g. 6-methyluridine), or propyne modifications. In another embodiment, between about 5% to about 100% (e.g., about 5%, 10%, 15%, 20%, 25%, 30%, 35%, 40%, 45%, 50%, 55%, 60%, 65%, 70%, 75%, 80%, 85%, 90%, 95% or 100% modified nucleotides) of the nucleotide positions in a siNA molecule of the invention comprise a nucleic acid backbone modification, such as a backbone modification having Formula I herein. In another embodiment, between about 5% to about 100% (e.g., about 5%, 10%, 15%, 20%, 25%, 30%, 35%, 40%, 45%, 50%, 55%, 60%, 65%, 70%, 75%, 80%, 85%, 90%, 95% or 100% modified nucleotides) of the nucleotide positions in a siNA molecule of the invention comprise a nucleic acid sugar, base, or backbone modification or any combination thereof (e.g., any combination of nucleic acid sugar, base, backbone or non-nucleotide modifications herein). The actual percentage of modified nucleotides present in a given siNA molecule will depend on the total number of nucleotides present in the siNA. If the siNA molecule is single stranded, the percent modification can be based upon the total number of nucleotides present in the single stranded siNA molecules. Likewise, if the siNA molecule is double stranded, the percent modification can be based upon the total number of nucleotides present in the sense strand, antisense strand, or both the sense and antisense strands.

[0037] A siNA molecule of the invention can comprise modified nucleotides at various locations within the siNA molecule. In one embodiment, a double stranded siNA molecule of the invention comprises modified nucleotides at internal base paired positions within the siNA duplex. For example, internal positions can comprise positions from about 3 to about 19 nucleotides from the 5′-end of either sense or antisense strand or region of a 21 nucleotide siNA duplex having 19 base pairs and two nucleotide 3′-overhangs. In another embodiment, a double stranded siNA molecule of the invention comprises modified nucleotides at non-base paired or overhang regions of the siNA molecule. For example, overhang positions can comprise positions from about 20 to about 21 nucleotides from the 5′-end of either sense or antisense strand or region of a 21 nucleotide siNA duplex having 19 base pairs and two nucleotide 3′-overhangs. In another embodiment, a double stranded siNA molecule of the invention comprises modified nucleotides at terminal positions of the siNA molecule. For example, such terminal regions include the 3′-position, 5′-position, for both 3′ and 5′-positions of the sense and/or antisense strand or region of the siNA molecule. In another embodiment, a double stranded siNA molecule of the invention comprises modified nucleotides at base-paired or internal positions, non-base paired or overhang regions, and/or terminal regions, or any combination thereof.

[0038] One aspect of the invention features a double-stranded short interfering nucleic acid (siNA) molecule that down-regulates expression of a target HDAC gene or that directs cleavage of a target HDAC RNA. In one embodiment, the double stranded siNA molecule comprises one or more chemical modifications and each strand of the double-stranded siNA is about 21 nucleotides long. In one embodiment, the double-stranded siNA molecule does not contain any ribonucleotides. In another embodiment, the double-stranded siNA molecule comprises one or more ribonucleotides. In one embodiment, each strand of the double-stranded siNA molecule independently comprises about 15 to about 30 (e.g., about 15, 16, 17, 18, 19, 20, 21, 22, 23, 24, 25, 26, 27, 28, 29, or 30) nucleotides, wherein each strand comprises about 15 to about 30 (e.g., about 15, 16, 17, 18, 19, 20, 21, 22, 23, 24, 25, 26, 27, 28, 29, or 30) nucleotides that are complementary to the nucleotides of the other strand. In one embodiment, one of the strands of the double-stranded siNA molecule comprises a nucleotide sequence that is complementary to a nucleotide sequence or a portion thereof of the target HDAC gene, and the second strand of the double-stranded siNA molecule comprises a nucleotide sequence substantially similar to the nucleotide sequence of the target HDAC gene or a portion thereof.

[0039] In another embodiment, the invention features a double-stranded short interfering nucleic acid (siNA) molecule that down-regulates expression of a target HDAC gene or that directs cleavage of a target HDAC RNA, comprising an antisense region, wherein the antisense region comprises a nucleotide sequence that is complementary to a nucleotide sequence of the target gene or a portion thereof, and a sense region, wherein the sense region comprises a nucleotide sequence substantially similar to the nucleotide sequence of the target HDAC gene or a portion thereof. In one embodiment, the antisense region and the sense region independently comprise about 15 to about 30 (e.g. about 15, 16, 17, 18, 19, 20, 21, 22, 23, 24, 25, 26, 27, 28, 29, or 30) nucleotides, wherein the antisense region comprises about 15 to about 30 (e.g. about 15, 16, 17, 18, 19, 20, 21, 22, 23, 24, 25, 26, 27, 28, 29, or 30) nucleotides that are complementary to nucleotides of the sense region.

[0040] In another embodiment, the invention features a double-stranded short interfering nucleic acid (siNA) molecule that down-regulates expression of a target HDAC gene or that directs cleavage of a target HDAC RNA, comprising a sense region and an antisense region, wherein the antisense region comprises a nucleotide sequence that is complementary to a nucleotide sequence of RNA encoded by the target HDAC gene or a portion thereof and the sense region comprises a nucleotide sequence that is complementary to the antisense region.

[0041] In one embodiment, a siNA molecule of the invention comprises blunt ends, i.e., ends that do not include any overhanging nucleotides. For example, a siNA molecule comprising modifications described herein (e.g., comprising nucleotides having Formulae I-VII or siNA constructs comprising “Stab 00“−”Stab 34” or “Stab 3F“−”Stab 34F” (Table IV) or any combination thereof (see Table IV)) and/or any length described herein can comprise blunt ends or ends with no overhanging nucleotides.

[0042] In one embodiment, any siNA molecule of the invention can comprise one or more blunt ends, i.e. where a blunt end does not have any overhanging nucleotides. In one embodiment, the blunt ended siNA molecule has a number of base pairs equal to the number of nucleotides present in each strand of the siNA molecule. In another embodiment, the siNA molecule comprises one blunt end, for example wherein the 5′-end of the antisense strand and the 3′-end of the sense strand do not have any overhanging nucleotides. In another example, the siNA molecule comprises one blunt end, for example wherein the 3′-end of the antisense strand and the 5′-end of the sense strand do not have any overhanging nucleotides. In another example, a siNA molecule comprises two blunt ends, for example wherein the 3′-end of the antisense strand and the 5′-end of the sense strand as well as the 5′-end of the antisense strand and 3′-end of the sense strand do not have any overhanging nucleotides. A blunt ended siNA molecule can comprise, for example, from about 15 to about 30 nucleotides (e.g., about 15, 16, 17, 18, 19, 20, 21, 22, 23, 24, 25, 26, 27, 28, 29, or 30 nucleotides). Other nucleotides present in a blunt ended siNA molecule can comprise, for example, mismatches, bulges, loops, or wobble base pairs to modulate the activity of the siNA molecule to mediate RNA interference.

[0043] By “blunt ends” is meant symmetric termini or termini of a double stranded siNA molecule having no overhanging nucleotides. The two strands of a double stranded siNA molecule align with each other without over-hanging nucleotides at the termini. For example, a blunt ended siNA construct comprises terminal nucleotides that are complementary between the sense and antisense regions of the siNA molecule.

[0044] In one embodiment, the invention features a double-stranded short interfering nucleic acid (siNA) molecule that down-regulates expression of a target HDAC gene or that directs cleavage of a target HDAC RNA, wherein the siNA molecule is assembled from two separate oligonucleotide fragments wherein one fragment comprises the sense region and the second fragment comprises the antisense region of the siNA molecule. The sense region can be connected to the antisense region via a linker molecule, such as a polynucleotide linker or a non-nucleotide linker.

[0045] In one embodiment, a siNA molecule of the invention is a double-stranded short interfering nucleic acid (siNA), wherein the double stranded nucleic acid molecule comprises about 15 to about 30 (e.g. about 15, 16, 17, 18, 19, 20, 21, 22, 23, 24, 25, 26, 27, 28, 29, or 30) base pairs, and wherein one or more (e.g., at least 1, 2, 3, 4, 5, 6, 7, 8, 9, 10, 11, 12, 13, 14, 15, 16, 17, 18, 19, 20, 21, 22, 23, 24, 25, 26, 27, 28, 29, or 30) of the nucleotide positions in each strand of the siNA molecule comprises a chemical modification. In another embodiment, the siNA contains at least 2, 3, 4, 5, or more different chemical modifications.

[0046] In one embodiment, the invention features double-stranded short interfering nucleic acid (siNA) molecule that down-regulates expression of a target HDAC gene or that directs cleavage of a target HDAC RNA, wherein the siNA molecule comprises about 15 to about 30 (e.g. about 15, 16, 17, 18, 19, 20, 21, 22, 23, 24, 25, 26, 27, 28, 29, or 30) base pairs, and wherein each strand of the siNA molecule comprises one or more chemical modifications. In one embodiment, each strand of the double stranded siNA molecule comprises at least two (e.g., 2, 3, 4, 5, or more) different chemical modifications, e.g., different nucleotide sugar, base, or backbone modifications. In another embodiment, one of the strands of the double-stranded siNA molecule comprises a nucleotide sequence that is complementary to a nucleotide sequence of a target HDAC gene or a portion thereof, and the second strand of the double-stranded siNA molecule comprises a nucleotide sequence substantially similar to the nucleotide sequence or a portion thereof of the target HDAC gene. In another embodiment, one of the strands of the double-stranded siNA molecule comprises a nucleotide sequence that is complementary to a nucleotide sequence of a target HDAC gene or portion thereof, and the second strand of the double-stranded siNA molecule comprises a nucleotide sequence substantially similar to the nucleotide sequence or portion thereof of the target HDAC gene. In another embodiment, each strand of the siNA molecule comprises about 15 to about 30 (e.g. about 15, 16, 17, 18, 19, 20, 21, 22, 23, 24, 25, 26, 27, 28, 29, or 30) nucleotides, and each strand comprises at least about 15 to about 30 (e.g. about 15, 16, 17, 18, 19, 20, 21, 22, 23, 24, 25, 26, 27, 28, 29, or 30) nucleotides that are complementary to the nucleotides of the other strand. The target HDAC gene can comprise, for example, sequences referred to herein or incorporated herein by reference.

[0047] In one embodiment, each strand of a double stranded siNA molecule of the invention comprises a different pattern of chemical modifications, such as any “Stab 00”−“Stab 34” or “Stab 3F“−”Stab 34F” (Table IV) modification patterns herein or any combination thereof (see Table IV). Non-limiting examples of sense and antisense strands of such siNA molecules having various modification patterns are shown in Table III.

[0048] In one embodiment, a siNA molecule of the invention comprises no ribonucleotides. In another embodiment, a siNA molecule of the invention comprises ribonucleotides.

[0049] In one embodiment, a siNA molecule of the invention comprises an antisense region comprising a nucleotide sequence that is complementary to a nucleotide sequence of a target HDAC gene or a portion thereof, and the siNA further comprises a sense region comprising a nucleotide sequence substantially similar to the nucleotide sequence of the target HDAC gene or a portion thereof. In another embodiment, the antisense region and the sense region each comprise about 15 to about 30 (e.g. about 15, 16, 17, 18, 19, 20, 21, 22, 23, 24, 25, 26, 27, 28, 29, or 30) nucleotides and the antisense region comprises at least about 15 to about 30 (e.g. about 15, 16, 17, 18, 19, 20, 21, 22, 23, 24, 25, 26, 27, 28, 29, or 30) nucleotides that are complementary to nucleotides of the sense region. In one embodiment, each strand of the double stranded siNA molecule comprises at least two (e.g., 2, 3, 4, 5, or more) different chemical modifications, e.g., different nucleotide sugar, base, or backbone modifications. The target HDAC gene can comprise, for example, sequences referred to herein or incorporated by reference herein. In another embodiment, the siNA is a double stranded nucleic acid molecule, where each of the two strands of the siNA molecule independently comprise about 15 to about 40 (e.g. about 15, 16, 17, 18, 19, 20, 21, 22, 23, 24, 25, 26, 27, 28, 29, 30, 31, 23, 33, 34, 35, 36, 37, 38, 39, or 40) nucleotides, and where one of the strands of the siNA molecule comprises at least about 15 (e.g. about 15, 16, 17, 18, 19, 20, 21, 22, 23, 24 or 25 or more) nucleotides that are complementary to the nucleic acid sequence of the target gene or a portion thereof.

[0050] In one embodiment, a siNA molecule of the invention comprises a sense region and an antisense region, wherein the antisense region comprises a nucleotide sequence that is complementary to a nucleotide sequence of RNA encoded by a target HDAC gene, or a portion thereof, and the sense region comprises a nucleotide sequence that is complementary to the antisense region. In one embodiment, the siNA molecule is assembled from two separate oligonucleotide fragments, wherein one fragment comprises the sense region and the second fragment comprises the antisense region of the siNA molecule. In another embodiment, the sense region is connected to the antisense region via a linker molecule. In another embodiment, the sense region is connected to the antisense region via a linker molecule, such as a nucleotide or non-nucleotide linker. In one embodiment, each strand of the double stranded siNA molecule comprises at least two (e.g., 2, 3, 4, 5, or more) different chemical modifications, e.g., different nucleotide sugar, base, or backbone modifications. The target HDAC gene can comprise, for example, sequences referred to herein, incorporated by reference herein, or otherwise known in the art.

[0051] In one embodiment, the invention features a double-stranded short interfering nucleic acid (siNA) molecule that down-regulates expression of a target HDAC gene or that directs cleavage of a target HDAC RNA, comprising a sense region and an antisense region, wherein the antisense region comprises a nucleotide sequence that is complementary to a nucleotide sequence of RNA encoded by the target HDAC gene or a portion thereof and the sense region comprises a nucleotide sequence that is complementary to the antisense region, and wherein the siNA molecule has one or more modified pyrimidine and/or purine nucleotides. In one embodiment, each strand of the double stranded siNA molecule comprises at least two (e.g., 2, 3, 4, 5, or more) different chemical modifications, e.g., different nucleotide sugar, base, or backbone modifications. In one embodiment, the pyrimidine nucleotides in the sense region are 2′-O-methyl pyrimidine nucleotides or 2′-deoxy-2′-fluoro pyrimidine nucleotides and the purine nucleotides present in the sense region are 2′-deoxy purine nucleotides. In another embodiment, the pyrimidine nucleotides in the sense region are 2′-deoxy-2′-fluoro pyrimidine nucleotides and the purine nucleotides present in the sense region are 2′-O-methyl purine nucleotides. In another embodiment, the pyrimidine nucleotides in the sense region are 2′-deoxy-2′-fluoro pyrimidine nucleotides and the purine nucleotides present in the sense region are 2′-deoxy purine nucleotides. In one embodiment, the pyrimidine nucleotides in the antisense region are 2′-deoxy-2′-fluoro pyrimidine nucleotides and the purine nucleotides present in the antisense region are 2′-O-methyl or 2′-deoxy purine nucleotides. In another embodiment of any of the above-described siNA molecules, any nucleotides present in a non-complementary region of the sense strand (e.g. overhang region) are 2′-deoxy nucleotides.

[0052] In one embodiment, the invention features a double-stranded short interfering nucleic acid (siNA) molecule that down-regulates expression of a target HDAC gene or that directs cleavage of a target HDAC RNA, wherein the siNA molecule is assembled from two separate oligonucleotide fragments wherein one fragment comprises the sense region and the second fragment comprises the antisense region of the siNA molecule, and wherein the fragment comprising the sense region includes a terminal cap moiety at the 5′-end, the 3′-end, or both of the 5′ and 3′ ends of the fragment. In one embodiment, the terminal cap moiety is an inverted deoxy abasic moiety or glyceryl moiety. In one embodiment, each of the two fragments of the siNA molecule independently comprise about 15 to about 30 (e.g. about 15, 16, 17, 18, 19, 20, 21, 22, 23, 24, 25, 26, 27, 28, 29, or 30) nucleotides. In another embodiment, each of the two fragments of the siNA molecule independently comprise about 15 to about 40 (e.g. about 15, 16, 17, 18, 19, 20, 21, 22, 23, 24, 25, 26, 27, 28, 29, 30, 31, 23, 33, 34, 35, 36, 37, 38, 39, or 40) nucleotides. In a non-limiting example, each of the two fragments of the siNA molecule comprise about 21 nucleotides.

[0053] In one embodiment, the invention features a siNA molecule comprising at least one modified nucleotide, wherein the modified nucleotide is a 2′-deoxy-2′-fluoro nucleotide, 2′-O-trifluoromethyl nucleotide, 2′-O-ethyl-trifluoromethoxy nucleotide, or 2′-O-difluoromethoxy-ethoxy nucleotide or any other modified nucleoside/nucleotide described herein and in U.S. Ser. No. 10/981,966, filed Nov. 5, 2004, incorporated by reference herein. In one embodiment, the invention features a siNA molecule comprising at least two (e.g., 2, 3, 4, 5, 6, 7, 8, 9, 10, or more) modified nucleotides, wherein the modified nucleotide is selected from the group consisting of 2′-deoxy-2′-fluoro nucleotide, 2′-O-trifluoromethyl nucleotide, 2′-O-ethyl-trifluoromethoxy nucleotide, or 2′-O-difluoromethoxy-ethoxy nucleotide or any other modified nucleoside/nucleotide described herein and in U.S. Ser. No. 10/981,966, filed Nov. 5, 2004, incorporated by reference herein. The modified nucleotide/nucleoside can be the same or different. The siNA can be, for example, about 15 to about 40 nucleotides in length. In one embodiment, all pyrimidine nucleotides present in the siNA are 2′-deoxy-2′-fluoro, 2′-O-trifluoromethyl, 2′-O-ethyl-trifluoromethoxy, or 2′-O-difluoromethoxy-ethoxy, 4′-thio pyrimidine nucleotides. In one embodiment, the modified nucleotides in the siNA include at least one 2′-deoxy-2′-fluoro cytidine or 2′-deoxy-2′-fluoro uridine nucleotide. In another embodiment, the modified nucleotides in the siNA include at least one 2′-fluoro cytidine and at least one 2′-deoxy-2′-fluoro uridine nucleotides. In one embodiment, all uridine nucleotides present in the siNA are 2′-deoxy-2′-fluoro uridine nucleotides. In one embodiment, all cytidine nucleotides present in the siNA are 2′-deoxy-2′-fluoro cytidine nucleotides. In one embodiment, all adenosine nucleotides present in the siNA are 2′-deoxy-2′-fluoro adenosine nucleotides. In one embodiment, all guanosine nucleotides present in the siNA are 2′-deoxy-2′-fluoro guanosine nucleotides. The siNA can further comprise at least one modified internucleotidic linkage, such as phosphorothioate linkage. In one embodiment, the 2′-deoxy-2′-fluoronucleotides are present at specifically selected locations in the siNA that are sensitive to cleavage by ribonucleases, such as locations having pyrimidine nucleotides.

[0054] In one embodiment, the invention features a method of increasing the stability of a siNA molecule against cleavage by ribonucleases comprising introducing at least one modified nucleotide into the siNA molecule, wherein the modified nucleotide is a 2′-deoxy-2′-fluoro nucleotide. In one embodiment, all pyrimidine nucleotides present in the siNA are 2′-deoxy-2′-fluoro pyrimidine nucleotides. In one embodiment, the modified nucleotides in the siNA include at least one 2′-deoxy-2′-fluoro cytidine or 2′-deoxy-2′-fluoro uridine nucleotide. In another embodiment, the modified nucleotides in the siNA include at least one 2′-fluoro cytidine and at least one 2′-deoxy-2′-fluoro uridine nucleotides. In one embodiment, all uridine nucleotides present in the siNA are 2′-deoxy-2′-fluoro uridine nucleotides. In one embodiment, all cytidine nucleotides present in the siNA are 2′-deoxy-2′-fluoro cytidine nucleotides. In one embodiment, all adenosine nucleotides present in the siNA are 2′-deoxy-2′-fluoro adenosine nucleotides. In one embodiment, all guanosine nucleotides present in the siNA are 2′-deoxy-2′-fluoro guanosine nucleotides. The siNA can further comprise at least one modified internucleotidic linkage, such as a phosphorothioate linkage. In one embodiment, the 2′-deoxy-2′-fluoronucleotides are present at specifically selected locations in the siNA that are sensitive to cleavage by ribonucleases, such as locations having pyrimidine nucleotides.

[0055] In one embodiment, the invention features a double-stranded short interfering nucleic acid (siNA) molecule that down-regulates expression of a target HDAC gene or that directs cleavage of a target HDAC RNA, comprising a sense region and an antisense region, wherein the antisense region comprises a nucleotide sequence that is complementary to a nucleotide sequence of RNA encoded by the target HDAC gene or a portion thereof and the sense region comprises a nucleotide sequence that is complementary to the antisense region, and wherein the purine nucleotides present in the antisense region comprise 2′-deoxy-purine nucleotides. In an alternative embodiment, the purine nucleotides present in the antisense region comprise 2′-O-methyl purine nucleotides. In either of the above embodiments, the antisense region can comprise a phosphorothioate internucleotide linkage at the 3′ end of the antisense region. Alternatively, in either of the above embodiments, the antisense region can comprise a glyceryl modification at the 3′ end of the antisense region. In another embodiment of any of the above-described siNA molecules, any nucleotides present in a non-complementary region of the antisense strand (e.g. overhang region) are 2′-deoxy nucleotides.

[0056] In one embodiment, the antisense region of a siNA molecule of the invention comprises sequence complementary to a portion of an endogenous transcript having sequence unique to a particular disease or trait related allele in a subject or organism, such as sequence comprising a single nucleotide polymorphism (SNP) associated with the disease or trait specific allele. As such, the antisense region of a siNA molecule of the invention can comprise sequence complementary to sequences that are unique to a particular allele to provide specificity in mediating selective RNAi against the disease, condition, or trait related allele.

[0057] In one embodiment, the invention features a double-stranded short interfering nucleic acid (siNA) molecule that down-regulates expression of a target HDAC gene or that directs cleavage of a target HDAC RNA, wherein the siNA molecule is assembled from two separate oligonucleotide fragments wherein one fragment comprises the sense region and the second fragment comprises the antisense region of the siNA molecule. In one embodiment, each strand of the double stranded siNA molecule is about 21 nucleotides long and where about 19 nucleotides of each fragment of the siNA molecule are base-paired to the complementary nucleotides of the other fragment of the siNA molecule, wherein at least two 3′ terminal nucleotides of each fragment of the siNA molecule are not base-paired to the nucleotides of the other fragment of the siNA molecule. In another embodiment, the siNA molecule is a double stranded nucleic acid molecule, where each strand is about 19 nucleotide long and where the nucleotides of each fragment of the siNA molecule are base-paired to the complementary nucleotides of the other fragment of the siNA molecule to form at least about 15 (e.g., 15, 16, 17, 18, or 19) base pairs, wherein one or both ends of the siNA molecule are blunt ends. In one embodiment, each of the two 3′ terminal nucleotides of each fragment of the siNA molecule is a 2′-deoxy-pyrimidine nucleotide, such as a 2′-deoxy-thymidine. In another embodiment, all nucleotides of each fragment of the siNA molecule are base-paired to the complementary nucleotides of the other fragment of the siNA molecule. In another embodiment, the siNA molecule is a double stranded nucleic acid molecule of about 19 to about 25 base pairs having a sense region and an antisense region, where about 19 nucleotides of the antisense region are base-paired to the nucleotide sequence or a portion thereof of the RNA encoded by the target gene. In another embodiment, about 21 nucleotides of the antisense region are base-paired to the nucleotide sequence or a portion thereof of the RNA encoded by the target gene. In any of the above embodiments, the 5′-end of the fragment comprising said antisense region can optionally include a phosphate group.

[0058] In one embodiment, the invention features a double-stranded short interfering nucleic acid (siNA) molecule that inhibits the expression of a target HDAC RNA sequence, wherein the siNA molecule does not contain any ribonucleotides and wherein each strand of the double-stranded siNA molecule is about 15 to about 30 nucleotides. In one embodiment, the siNA molecule is 21 nucleotides in length. Examples of non-ribonucleotide containing siNA constructs are combinations of stabilization chemistries shown in Table IV in any combination of Sense/Antisense chemistries, such as Stab 7/8, Stab 7/11, Stab 8/8, Stab 18/8, Stab 18/11, Stab 12/13, Stab 7/13, Stab 18/13, Stab 7/19, Stab 8/19, Stab 18/19, Stab 7/20, Stab 8/20, Stab 18/20, Stab 7/32, Stab 8/32, or Stab 18/32 (e.g., any siNA having Stab 7, 8, 11, 12, 13, 14, 15, 17, 18, 19, 20, or 32 sense or antisense strands or any combination thereof). Herein, numeric Stab chemistries can include both 2′-fluoro and 2′-OCF3 versions of the chemistries shown in Table IV. For example, “Stab 7/8” refers to both Stab 7/8 and Stab 7F/8F etc. In one embodiment, the invention features a chemically synthesized double stranded RNA molecule that directs cleavage of a target HDAC RNA via RNA interference, wherein each strand of said RNA molecule is about 15 to about 30 nucleotides in length; one strand of the RNA molecule comprises nucleotide sequence having sufficient complementarity to the target HDAC RNA for the RNA molecule to direct cleavage of the target HDAC RNA via RNA interference; and wherein at least one strand of the RNA molecule optionally comprises one or more chemically modified nucleotides described herein, such as without limitation deoxynucleotides, 2′-O-methyl nucleotides, 2′-deoxy-2′-fluoro nucleotides, 2′-O-methoxyethyl nucleotides, 4′-thio nucleotides, 2′-O-trifluoromethyl nucleotides, 2′-O-ethyl-trifluoromethoxy nucleotides, 2′-O-difluoromethoxy-ethoxy nucleotides, etc. The chemically modified nucleotides can be the same or different.

[0059] In one embodiment, a target HDAC RNA of the invention comprises sequence encoding a HDAC protein.

[0060] In one embodiment, target HDAC RNA of the invention comprises non-coding HDAC RNA sequence (e.g., miRNA, snRNA siRNA etc.).

[0061] In one embodiment, the invention features a medicament comprising a siNA molecule of the invention.

[0062] In one embodiment, the invention features an active ingredient comprising a siNA molecule of the invention.

[0063] In one embodiment, the invention features the use of a double-stranded short interfering nucleic acid (siNA) molecule to inhibit, down-regulate, or reduce expression of a target HDAC gene, wherein the siNA molecule comprises one or more chemical modifications that can be the same or different and each strand of the double-stranded siNA is independently about 15 to about 30 or more (e.g., about 15, 16, 17, 18, 19, 20, 21, 22, 23, 24, 25, 26, 27, 28, 29 or 30 or more) nucleotides long. In one embodiment, the siNA molecule of the invention is a double stranded nucleic acid molecule comprising one or more chemical modifications, where each of the two fragments of the siNA molecule independently comprise about 15 to about 40 (e.g. about 15, 16, 17, 18, 19, 20, 21, 22, 23, 24, 25, 26, 27, 28, 29, 30, 31, 23, 33, 34, 35, 36, 37, 38, 39, or 40) nucleotides and where one of the strands comprises at least 15 nucleotides that are complementary to nucleotide sequence of HDAC target encoding RNA or a portion thereof. In a non-limiting example, each of the two fragments of the siNA molecule comprise about 21 nucleotides. In another embodiment, the siNA molecule is a double stranded nucleic acid molecule comprising one or more chemical modifications, where each strand is about 21 nucleotide long and where about 19 nucleotides of each fragment of the siNA molecule are base-paired to the complementary nucleotides of the other fragment of the siNA molecule, wherein at least two 3′ terminal nucleotides of each fragment of the siNA molecule are not base-paired to the nucleotides of the other fragment of the siNA molecule. In another embodiment, the siNA molecule is a double stranded nucleic acid molecule comprising one or more chemical modifications, where each strand is about 19 nucleotide long and where the nucleotides of each fragment of the siNA molecule are base-paired to the complementary nucleotides of the other fragment of the siNA molecule to form at least about 15 (e.g., 15, 16, 17, 18, or 19) base pairs, wherein one or both ends of the siNA molecule are blunt ends. In one embodiment, each of the two 3′ terminal nucleotides of each fragment of the siNA molecule is a 2′-deoxy-pyrimidine nucleotide, such as a 2′-deoxy-thymidine. In another embodiment, all nucleotides of each fragment of the siNA molecule are base-paired to the complementary nucleotides of the other fragment of the siNA molecule. In another embodiment, the siNA molecule is a double stranded nucleic acid molecule of about 19 to about 25 base pairs having a sense region and an antisense region and comprising one or more chemical modifications, where about 19 nucleotides of the antisense region are base-paired to the nucleotide sequence or a portion thereof of the RNA encoded by the target HDAC gene. In another embodiment, about 21 nucleotides of the antisense region are base-paired to the nucleotide sequence or a portion thereof of the RNA encoded by the target HDAC gene. In any of the above embodiments, the 5′-end of the fragment comprising said antisense region can optionally include a phosphate group.

[0064] In one embodiment, the invention features the use of a double-stranded short interfering nucleic acid (siNA) molecule that inhibits, down-regulates, or reduces expression of a target HDAC gene, wherein one of the strands of the double-stranded siNA molecule is an antisense strand which comprises nucleotide sequence that is complementary to nucleotide sequence of target HDAC RNA or a portion thereof, the other strand is a sense strand which comprises nucleotide sequence that is complementary to a nucleotide sequence of the antisense strand. In one embodiment, each strand has at least two (e.g., 2, 3, 4, 5, or more) chemical modifications, which can be the same or different, such as nucleotide, sugar, base, or backbone modifications. In one embodiment, a majority of the pyrimidine nucleotides present in the double-stranded siNA molecule comprises a sugar modification. In one embodiment, a majority of the purine nucleotides present in the double-stranded siNA molecule comprises a sugar modification.

[0065] In one embodiment, the invention features a double-stranded short interfering nucleic acid (siNA) molecule that inhibits, down-regulates, or reduces expression of a target HDAC gene, wherein one of the strands of the double-stranded siNA molecule is an antisense strand which comprises nucleotide sequence that is complementary to nucleotide sequence of target HDAC RNA or a portion thereof, wherein the other strand is a sense strand which comprises nucleotide sequence that is complementary to a nucleotide sequence of the antisense strand. In one embodiment, each strand has at least two (e.g., 2, 3, 4, 5, or more) chemical modifications, which can be the same or different, such as nucleotide, sugar, base, or backbone modifications. In one embodiment, a majority of the pyrimidine nucleotides present in the double-stranded siNA molecule comprises a sugar modification. In one embodiment, a majority of the purine nucleotides present in the double-stranded siNA molecule comprises a sugar modification.

[0066] In one embodiment, the invention features a double-stranded short interfering nucleic acid (siNA) molecule that inhibits, down-regulates, or reduces expression of a target HDAC gene, wherein one of the strands of the double-stranded siNA molecule is an antisense strand which comprises nucleotide sequence that is complementary to nucleotide sequence of target HDAC RNA that encodes a protein or portion thereof, the other strand is a sense strand which comprises nucleotide sequence that is complementary to a nucleotide sequence of the antisense strand and wherein a majority of the pyrimidine nucleotides present in the double-stranded siNA molecule comprises a sugar modification. In one embodiment, each strand of the siNA molecule comprises about 15 to about 30 or more (e.g., about 15, 16, 17, 18, 19, 20, 21, 22, 23, 24, 25, 26, 27, 28, 29, or 30 or more) nucleotides, wherein each strand comprises at least about 15 nucleotides that are complementary to the nucleotides of the other strand. In one embodiment, the siNA molecule is assembled from two oligonucleotide fragments, wherein one fragment comprises the nucleotide sequence of the antisense strand of the siNA molecule and a second fragment comprises nucleotide sequence of the sense region of the siNA molecule. In one embodiment, the sense strand is connected to the antisense strand via a linker molecule, such as a polynucleotide linker or a non-nucleotide linker. In a further embodiment, the pyrimidine nucleotides present in the sense strand are 2′-deoxy-2′fluoro pyrimidine nucleotides and the purine nucleotides present in the sense region are 2′-deoxy purine nucleotides. In another embodiment, the pyrimidine nucleotides present in the sense strand are 2′-deoxy-2′fluoro pyrimidine nucleotides and the purine nucleotides present in the sense region are 2′-O-methyl purine nucleotides. In still another embodiment, the pyrimidine nucleotides present in the antisense strand are 2′-deoxy-2′-fluoro pyrimidine nucleotides and any purine nucleotides present in the antisense strand are 2′-deoxy purine nucleotides. In another embodiment, the antisense strand comprises one or more 2′-deoxy-2′-fluoro pyrimidine nucleotides and one or more 2′-O-methyl purine nucleotides. In another embodiment, the pyrimidine nucleotides present in the antisense strand are 2′-deoxy-2′-fluoro pyrimidine nucleotides and any purine nucleotides present in the antisense strand are 2′-O-methyl purine nucleotides. In a further embodiment the sense strand comprises a 3′-end and a 5′-end, wherein a terminal cap moiety (e.g., an inverted deoxy abasic moiety or inverted deoxy nucleotide moiety such as inverted thymidine) is present at the 5′-end, the 3′-end, or both of the 5′ and 3′ ends of the sense strand. In another embodiment, the antisense strand comprises a phosphorothioate internucleotide linkage at the 3′ end of the antisense strand. In another embodiment, the antisense strand comprises a glyceryl modification at the 3′ end. In another embodiment, the 5′-end of the antisense strand optionally includes a phosphate group.

[0067] In any of the above-described embodiments of a double-stranded short interfering nucleic acid (siNA) molecule that inhibits expression of a target HDAC gene, wherein a majority of the pyrimidine nucleotides present in the double-stranded siNA molecule comprises a sugar modification, each of the two strands of the siNA molecule can comprise about 15 to about 30 or more (e.g., about 15, 16, 17, 18, 19, 20, 21, 22, 23, 24, 25, 26, 27, 28, 29, or 30 or more) nucleotides. In one embodiment, about 15 to about 30 or more (e.g., about 15, 16, 17, 18, 19, 20, 21, 22, 23, 24, 25, 26, 27, 28, 29, or 30 or more) nucleotides of each strand of the siNA molecule are base-paired to the complementary nucleotides of the other strand of the siNA molecule. In another embodiment, about 15 to about 30 or more (e.g., about 15, 16, 17, 18, 19, 20, 21, 22, 23, 24, 25, 26, 27, 28, 29, or 30 or more) nucleotides of each strand of the siNA molecule are base-paired to the complementary nucleotides of the other strand of the siNA molecule, wherein at least two 3′ terminal nucleotides of each strand of the siNA molecule are not base-paired to the nucleotides of the other strand of the siNA molecule. In another embodiment, each of the two 3′ terminal nucleotides of each fragment of the siNA molecule is a 2′-deoxy-pyrimidine, such as 2′-deoxy-thymidine. In one embodiment, each strand of the siNA molecule is base-paired to the complementary nucleotides of the other strand of the siNA molecule. In one embodiment, about 15 to about 30 (e.g., about 15, 16, 17, 18, 19, 20, 21, 22, 23, 24, 25, 26, 27, 28, 29, or 30) nucleotides of the antisense strand are base-paired to the nucleotide sequence of the target RNA or a portion thereof. In one embodiment, about 18 to about 25 (e.g., about 18, 19, 20, 21, 22, 23, 24, or 25) nucleotides of the antisense strand are base-paired to the nucleotide sequence of the target RNA or a portion thereof.

[0068] In one embodiment, the invention features a double-stranded short interfering nucleic acid (siNA) molecule that inhibits expression of a target HDAC gene, wherein one of the strands of the double-stranded siNA molecule is an antisense strand which comprises nucleotide sequence that is complementary to nucleotide sequence of target HDAC RNA or a portion thereof, the other strand is a sense strand which comprises nucleotide sequence that is complementary to a nucleotide sequence of the antisense strand. In one embodiment, each strand has at least two (e.g., 2, 3, 4, 5, or more) different chemical modifications, such as nucleotide sugar, base, or backbone modifications. In one embodiment, a majority of the pyrimidine nucleotides present in the double-stranded siNA molecule comprises a sugar modification. In one embodiment, a majority of the purine nucleotides present in the double-stranded siNA molecule comprises a sugar modification. In one embodiment, the 5′-end of the antisense strand optionally includes a phosphate group.

[0069] In one embodiment, the invention features a double-stranded short interfering nucleic acid (siNA) molecule that inhibits expression of a target HDAC gene, wherein one of the strands of the double-stranded siNA molecule is an antisense strand which comprises nucleotide sequence that is complementary to nucleotide sequence of target HDAC RNA or a portion thereof, the other strand is a sense strand which comprises nucleotide sequence that is complementary to a nucleotide sequence of the antisense strand and wherein a majority of the pyrimidine nucleotides present in the double-stranded siNA molecule comprises a sugar modification, and wherein the nucleotide sequence or a portion thereof of the antisense strand is complementary to a nucleotide sequence of the untranslated region or a portion thereof of the target RNA.

[0070] In one embodiment, the invention features a double-stranded short interfering nucleic acid (siNA) molecule that inhibits expression of a target HDAC gene, wherein one of the strands of the double-stranded siNA molecule is an antisense strand which comprises nucleotide sequence that is complementary to nucleotide sequence of target HDAC RNA or a portion thereof, wherein the other strand is a sense strand which comprises nucleotide sequence that is complementary to a nucleotide sequence of the antisense strand, wherein a majority of the pyrimidine nucleotides present in the double-stranded siNA molecule comprises a sugar modification, and wherein the nucleotide sequence of the antisense strand is complementary to a nucleotide sequence of the target HDAC RNA or a portion thereof that is present in the target HDAC RNA.

[0071] In one embodiment, the invention features a composition comprising a siNA molecule of the invention in a pharmaceutically acceptable carrier or diluent.

[0072] In a non-limiting example, the introduction of chemically-modified nucleotides into nucleic acid molecules provides a powerful tool in overcoming potential limitations of in vivo stability and bioavailability inherent to native RNA molecules that are delivered exogenously. For example, the use of chemically-modified nucleic acid molecules can enable a lower dose of a particular nucleic acid molecule for a given therapeutic effect since chemically-modified nucleic acid molecules tend to have a longer half-life in serum. Furthermore, certain chemical modifications can improve the bioavailability of nucleic acid molecules by targeting particular cells or tissues and/or improving cellular uptake of the nucleic acid molecule. Therefore, even if the activity of a chemically-modified nucleic acid molecule is reduced as compared to a native nucleic acid molecule, for example, when compared to an all-RNA nucleic acid molecule, the overall activity of the modified nucleic acid molecule can be greater than that of the native molecule due to improved stability and/or delivery of the molecule. Unlike native unmodified siNA, chemically-modified siNA can also minimize the possibility of activating interferon activity or immunostimulation in humans.

[0073] In any of the embodiments of siNA molecules described herein, the antisense region of a siNA molecule of the invention can comprise a phosphorothioate internucleotide linkage at the 3′-end of said antisense region. In any of the embodiments of siNA molecules described herein, the antisense region can comprise about one to about five phosphorothioate internucleotide linkages at the 5′-end of said antisense region. In any of the embodiments of siNA molecules described herein, the 3′-terminal nucleotide overhangs of a siNA molecule of the invention can comprise ribonucleotides or deoxyribonucleotides that are chemically-modified at a nucleic acid sugar, base, or backbone. In any of the embodiments of siNA molecules described herein, the 3′-terminal nucleotide overhangs can comprise one or more universal base ribonucleotides. In any of the embodiments of siNA molecules described herein, the 3′-terminal nucleotide overhangs can comprise one or more acyclic nucleotides.

[0074] One embodiment of the invention provides an expression vector comprising a nucleic acid sequence encoding at least one siNA molecule of the invention in a manner that allows expression of the nucleic acid molecule. Another embodiment of the invention provides a mammalian cell comprising such an expression vector. The mammalian cell can be a human cell. The siNA molecule of the expression vector can comprise a sense region and an antisense region. The antisense region can comprise sequence complementary to a RNA or DNA sequence encoding a HDCA target and the sense region can comprise sequence complementary to the antisense region. The siNA molecule can comprise two distinct strands having complementary sense and antisense regions. The siNA molecule can comprise a single strand having complementary sense and antisense regions.

[0075] In one embodiment, the invention features a chemically-modified short interfering nucleic acid (siNA) molecule capable of mediating RNA interference (RNAi) inside a cell or reconstituted in vitro system, wherein the chemical modification comprises one or more (e.g., about 1, 2, 3, 4, 5, 6, 7, 8, 9, 10, or more) nucleotides comprising a backbone modified internucleotide linkage having Formula I: [chemical structure]
wherein each R1 and R2 is independently any nucleotide, non-nucleotide, or polynucleotide which can be naturally-occurring or chemically-modified, each X and Y is independently O, S, N, alkyl, or substituted alkyl, each Z and W is independently O, S, N, alkyl, substituted alkyl, O-alkyl, S-alkyl, alkaryl, aralkyl, or acetyl and wherein W, X, Y, and Z are optionally not all O. In another embodiment, a backbone modification of the invention comprises a phosphonoacetate and/or thiophosphonoacetate internucleotide linkage (see for example Sheehan et al., 2003, Nucleic Acids Research, 31, 4109-4118).

[0076] The chemically-modified internucleotide linkages having Formula I, for example, wherein any Z, W, X, and/or Y independently comprises a sulphur atom, can be present in one or both oligonucleotide strands of the siNA duplex, for example, in the sense strand, the antisense strand, or both strands. The siNA molecules of the invention can comprise one or more (e.g., about 1, 2, 3, 4, 5, 6, 7, 8, 9, 10, or more) chemically-modified internucleotide linkages having Formula I at the 3′-end, the 5′-end, or both of the 3′ and 5′-ends of the sense strand, the antisense strand, or both strands. For example, an exemplary siNA molecule of the invention can comprise about 1 to about 5 or more (e.g., about 1, 2, 3, 4, 5, or more) chemically-modified internucleotide linkages having Formula I at the 5′-end of the sense strand, the antisense strand, or both strands. In another non-limiting example, an exemplary siNA molecule of the invention can comprise one or more (e.g., about 1, 2, 3, 4, 5, 6, 7, 8, 9, 10, or more) pyrimidine nucleotides with chemically-modified internucleotide linkages having Formula I in the sense strand, the antisense strand, or both strands. In yet another non-limiting example, an exemplary siNA molecule of the invention can comprise one or more (e.g., about 1, 2, 3, 4, 5, 6, 7, 8, 9, 10, or more) purine nucleotides with chemically-modified internucleotide linkages having Formula I in the sense strand, the antisense strand, or both strands. In another embodiment, a siNA molecule of the invention having internucleotide linkage(s) of Formula I also comprises a chemically-modified nucleotide or non-nucleotide having any of Formulae I-VII.

[0077] In one embodiment, the invention features a chemically-modified short interfering nucleic acid (siNA) molecule capable of mediating RNA interference (RNAi) inside a cell or reconstituted in vitro system, wherein the chemical modification comprises one or more (e.g., about 1, 2, 3, 4, 5, 6, 7, 8, 9, 10, or more) nucleotides or non-nucleotides having Formula II: [chemical structure]
wherein each R3, R4, R5, R6, R7, R8, R10, R1 and R12 is independently H, OH, alkyl, substituted alkyl, alkaryl or aralkyl, F, Cl, Br, CN, CF3, OCF3, OCN, O-alkyl, S-alkyl, N-alkyl, O-alkenyl, S-alkenyl, N-alkenyl, SO-alkyl, alkyl-OSH, alkyl-OH, O-alkyl-OH, O-alkyl-SH, S-alkyl-OH, S-alkyl-SH, alkyl-S-alkyl, alkyl-O-alkyl, ONO2, NO2, N3, NH2, aminoalkyl, aminoacid, aminoacyl, ONH2, O-aminoalkyl, O-aminoacid, O-aminoacyl, heterocycloalkyl, heterocycloalkaryl, aminoalkylamino, polyalklylamino, substituted silyl, or group having Formula I or II; R9 is O, S, CH2, S═O, CHF, or CF2, and B is a nucleosidic base such as adenine, guanine, uracil, cytosine, thymine, 2-aminoadenosine, 5-methylcytosine, 2,6-diaminopurine, or any other non-naturally occurring base that can be complementary or non-complementary to target RNA or a non-nucleosidic base such as phenyl, naphthyl, 3-nitropyrrole, 5-nitroindole, nebularine, pyridone, pyridinone, or any other non-naturally occurring universal base that can be complementary or non-complementary to target RNA. In one embodiment, R3 and/or R7 comprises a conjugate moiety and a linker (e.g., a nucleotide or non-nucleotide linker as described herein or otherwise known in the art). Non-limiting examples of conjugate moieties include ligands for cellular receptors, such as peptides derived from naturally occurring protein ligands; protein localization sequences, including cellular ZIP code sequences; antibodies; nucleic acid aptamers; vitamins and other co-factors, such as folate and N-acetylgalactosamine; polymers, such as polyethyleneglycol (PEG); phospholipids; cholesterol; steroids, and polyamines, such as PEI, spermine or spermidine.

[0078] The chemically-modified nucleotide or non-nucleotide of Formula II can be present in one or both oligonucleotide strands of the siNA duplex, for example in the sense strand, the antisense strand, or both strands. The siNA molecules of the invention can comprise one or more chemically-modified nucleotides or non-nucleotides of Formula II at the 3′-end, the 5′-end, or both of the 3′ and 5′-ends of the sense strand, the antisense strand, or both strands. For example, an exemplary siNA molecule of the invention can comprise about 1 to about 5 or more (e.g., about 1, 2, 3, 4, 5, or more) chemically-modified nucleotides or non-nucleotides of Formula II at the 5′-end of the sense strand, the antisense strand, or both strands. In anther non-limiting example, an exemplary siNA molecule of the invention can comprise about 1 to about 5 or more (e.g., about 1, 2, 3, 4, 5, or more) chemically-modified nucleotides or non-nucleotides of Formula II at the 3′-end of the sense strand, the antisense strand, or both strands.

[0079] In one embodiment, the invention features a chemically-modified short interfering nucleic acid (siNA) molecule capable of mediating RNA interference (RNAi) inside a cell or reconstituted in vitro system, wherein the chemical modification comprises one or more (e.g., about 1, 2, 3, 4, 5, 6, 7, 8, 9, 10, or more) nucleotides or non-nucleotides having Formula III: [chemical structure]
wherein each R3, R4, R5, R6, R7, R8, R10, R11 and R12 is independently H, OH, alkyl, substituted alkyl, alkaryl or aralkyl, F, Cl, Br, CN, CF3, OCF3, OCN, O-alkyl, S-alkyl, N-alkyl, O-alkenyl, S-alkenyl, N-alkenyl, SO-alkyl, alkyl-OSH, alkyl-OH, O-alkyl-OH, O-alkyl-SH, S-alkyl-OH, S-alkyl-SH, alkyl-S-alkyl, alkyl-O-alkyl, ONO2, NO2, N3, NH2, aminoalkyl, aminoacid, aminoacyl, ONH2, O-aminoalkyl, O-aminoacid, O-aminoacyl, heterocycloalkyl, heterocycloalkaryl, aminoalkylamino, polyalklylamino, substituted silyl, or group having Formula I or II; R9 is O, S, CH2, S═O, CHF, or CF2, and B is a nucleosidic base such as adenine, guanine, uracil, cytosine, thymine, 2-aminoadenosine, 5-methylcytosine, 2,6-diaminopurine, or any other non-naturally occurring base that can be employed to be complementary or non-complementary to target RNA or a non-nucleosidic base such as phenyl, naphthyl, 3-nitropyrrole, 5-nitroindole, nebularine, pyridone, pyridinone, or any other non-naturally occurring universal base that can be complementary or non-complementary to target RNA. In one embodiment, R3 and/or R7 comprises a conjugate moiety and a linker (e.g., a nucleotide or non-nucleotide linker as described herein or otherwise known in the art). Non-limiting examples of conjugate moieties include ligands for cellular receptors, such as peptides derived from naturally occurring protein ligands; protein localization sequences, including cellular ZIP code sequences; antibodies; nucleic acid aptamers; vitamins and other co-factors, such as folate and N-acetylgalactosamine; polymers, such as polyethyleneglycol (PEG); phospholipids; cholesterol; steroids, and polyamines, such as PEI, spermine or spermidine.

[0080] The chemically-modified nucleotide or non-nucleotide of Formula III can be present in one or both oligonucleotide strands of the siNA duplex, for example, in the sense strand, the antisense strand, or both strands. The siNA molecules of the invention can comprise one or more chemically-modified nucleotides or non-nucleotides of Formula III at the 3′-end, the 5′-end, or both of the 3′ and 5′-ends of the sense strand, the antisense strand, or both strands. For example, an exemplary siNA molecule of the invention can comprise about 1 to about 5 or more (e.g., about 1, 2, 3, 4, 5, or more) chemically-modified nucleotide(s) or non-nucleotide(s) of Formula III at the 5′-end of the sense strand, the antisense strand, or both strands. In anther non-limiting example, an exemplary siNA molecule of the invention can comprise about 1 to about 5 or more (e.g., about 1, 2, 3, 4, 5, or more) chemically-modified nucleotide or non-nucleotide of Formula III at the 3′-end of the sense strand, the antisense strand, or both strands.

[0081] In another embodiment, a siNA molecule of the invention comprises a nucleotide having Formula II or III, wherein the nucleotide having Formula II or III is in an inverted configuration. For example, the nucleotide having Formula II or III is connected to the siNA construct in a 3′-3′,3′-2′,2′-3′, or 5′-5′ configuration, such as at the 3′-end, the 5′-end, or both of the 3′ and 5′-ends of one or both siNA strands.

[0082] In one embodiment, the invention features a chemically-modified short interfering nucleic acid (siNA) molecule capable of mediating RNA interference (RNAi) inside a cell or reconstituted in vitro system, wherein the chemical modification comprises a 5′-terminal phosphate group having Formula IV: [chemical structure]
wherein each X and Y is independently O, S, N, alkyl, substituted alkyl, or alkylhalo; wherein each Z and W is independently O, S, N, alkyl, substituted alkyl, O-alkyl, S-alkyl, alkaryl, aralkyl, alkylhalo, or acetyl; and wherein W, X, Y and Z are not all O.

[0083] In one embodiment, the invention features a siNA molecule having a 5′-terminal phosphate group having Formula IV on the target-complementary strand, for example, a strand complementary to a target RNA, wherein the siNA molecule comprises an all RNA siNA molecule. In another embodiment, the invention features a siNA molecule having a 5′-terminal phosphate group having Formula IV on the target-complementary strand wherein the siNA molecule also comprises about 1 to about 3 (e.g., about 1, 2, or 3) nucleotide 3′-terminal nucleotide overhangs having about 1 to about 4 (e.g., about 1, 2, 3, or 4) deoxyribonucleotides on the 3′-end of one or both strands. In another embodiment, a 5′-terminal phosphate group having Formula IV is present on the target-complementary strand of a siNA molecule of the invention, for example a siNA molecule having chemical modifications having any of Formulae I-VII.

[0084] In one embodiment, the invention features a chemically-modified short interfering nucleic acid (siNA) molecule capable of mediating RNA interference (RNAi) inside a cell or reconstituted in vitro system, wherein the chemical modification comprises one or more phosphorothioate internucleotide linkages. For example, in a non-limiting example, the invention features a chemically-modified short interfering nucleic acid (siNA) having about 1, 2, 3, 4, 5, 6, 7, 8 or more phosphorothioate internucleotide linkages in one siNA strand. In yet another embodiment, the invention features a chemically-modified short interfering nucleic acid (siNA) individually having about 1, 2, 3, 4, 5, 6, 7, 8 or more phosphorothioate internucleotide linkages in both siNA strands. The phosphorothioate internucleotide linkages can be present in one or both oligonucleotide strands of the siNA duplex, for example in the sense strand, the antisense strand, or both strands. The siNA molecules of the invention can comprise one or more phosphorothioate internucleotide linkages at the 3′-end, the 5′-end, or both of the 3′- and 5′-ends of the sense strand, the antisense strand, or both strands. For example, an exemplary siNA molecule of the invention can comprise about 1 to about 5 or more (e.g., about 1, 2, 3, 4, 5, or more) consecutive phosphorothioate internucleotide linkages at the 5′-end of the sense strand, the antisense strand, or both strands. In another non-limiting example, an exemplary siNA molecule of the invention can comprise one or more (e.g., about 1, 2, 3, 4, 5, 6, 7, 8, 9, 10, or more) pyrimidine phosphorothioate internucleotide linkages in the sense strand, the antisense strand, or both strands. In yet another non-limiting example, an exemplary siNA molecule of the invention can comprise one or more (e.g., about 1, 2, 3, 4, 5, 6, 7, 8, 9, 10, or more) purine phosphorothioate internucleotide linkages in the sense strand, the antisense strand, or both strands.

[0085] Each strand of the double stranded siNA molecule can have one or more chemical modifications such that each strand comprises a different pattern of chemical modifications. Several non-limiting examples of modification schemes that could give rise to different patterns of modifications are provided herein.

[0086] In one embodiment, the invention features a siNA molecule, wherein the sense strand comprises one or more, for example, about 1, 2, 3, 4, 5, 6, 7, 8, 9, 10, or more phosphorothioate internucleotide linkages, and/or one or more (e.g., about 1, 2, 3, 4, 5, 6, 7, 8, 9, 10 or more) 2′-deoxy, 2′-O-methyl, 2′-deoxy-2′-fluoro, 2′-O-trifluoromethyl, 2′-O-ethyl-trifluoromethoxy, 2′-O-difluoromethoxy-ethoxy and/or about one or more (e.g., about 1, 2, 3, 4, 5, 6, 7, 8, 9, 10 or more) universal base modified nucleotides, and optionally a terminal cap molecule at the 3′-end, the 5′-end, or both of the 3′- and 5′-ends of the sense strand; and wherein the antisense strand comprises about 1 to about 10 or more, specifically about 1, 2, 3, 4, 5, 6, 7, 8, 9, 10, or more phosphorothioate internucleotide linkages, and/or one or more (e.g., about 1, 2, 3, 4, 5, 6, 7, 8, 9, 10 or more) 2′-deoxy, 2′-O-methyl, 2′-deoxy-2′-fluoro, 2′-O-trifluoromethyl, 2′-O-ethyl-trifluoromethoxy, 2′-O-difluoromethoxy-ethoxy, 4′-thio and/or one or more (e.g., about 1, 2, 3, 4, 5, 6, 7, 8, 9, 10 or more) universal base modified nucleotides, and optionally a terminal cap molecule at the 3′-end, the 5′-end, or both of the 3′- and 5′-ends of the antisense strand. In another embodiment, one or more, for example about 1, 2, 3, 4, 5, 6, 7, 8, 9, 10, or more, pyrimidine nucleotides of the sense and/or antisense siNA strand are chemically-modified with 2′-deoxy, 2′-O-methyl, 2′-O-trifluoromethyl, 2′-O-ethyl-trifluoromethoxy, 2′-O-difluoromethoxy-ethoxy, 4′-thio and/or 2′-deoxy-2′-fluoro nucleotides, with or without one or more, for example about 1, 2, 3, 4, 5, 6, 7, 8, 9, 10, or more, phosphorothioate internucleotide linkages and/or a terminal cap molecule at the 3′-end, the 5′-end, or both of the 3′- and 5′-ends, being present in the same or different strand.

[0087] In another embodiment, the invention features a siNA molecule, wherein the sense strand comprises about 1 to about 5, specifically about 1, 2, 3, 4, or 5 phosphorothioate internucleotide linkages, and/or one or more (e.g., about 1, 2, 3, 4, 5, or more) 2′-deoxy, 2′-O-methyl, 2′-deoxy-2′-fluoro, 2′-O-trifluoromethyl, 2′-O-ethyl-trifluoromethoxy, 2′-O-difluoromethoxy-ethoxy, 4′-thio and/or one or more (e.g., about 1, 2, 3, 4, 5, or more) universal base modified nucleotides, and optionally a terminal cap molecule at the 3-end, the 5′-end, or both of the 3′- and 5′-ends of the sense strand; and wherein the antisense strand comprises about 1 to about 5 or more, specifically about 1, 2, 3, 4, 5, or more phosphorothioate internucleotide linkages, and/or one or more (e.g., about 1, 2, 3, 4, 5, 6, 7, 8, 9, 10 or more) 2′-deoxy, 2′-O-methyl, 2′-deoxy-2′-fluoro, 2′-O-trifluoromethyl, 2′-O-ethyl-trifluoromethoxy, 2′-O-difluoromethoxy-ethoxy, 4′-thio and/or one or more (e.g., about 1, 2, 3, 4, 5, 6, 7, 8, 9, 10 or more) universal base modified nucleotides, and optionally a terminal cap molecule at the 3′-end, the 5′-end, or both of the 3′- and 5′-ends of the antisense strand. In another embodiment, one or more, for example about 1, 2, 3, 4, 5, 6, 7, 8, 9, 10, or more, pyrimidine nucleotides of the sense and/or antisense siNA strand are chemically-modified with 2′-deoxy, 2′-O-methyl, 2′-O-trifluoromethyl, 2′-O-ethyl-trifluoromethoxy, 2′-O-difluoromethoxy-ethoxy, 4′-thio and/or 2′-deoxy-2′-fluoro nucleotides, with or without about 1 to about 5 or more, for example about 1, 2, 3, 4, 5, or more phosphorothioate internucleotide linkages and/or a terminal cap molecule at the 3′-end, the 5′-end, or both of the 3′- and 5′-ends, being present in the same or different strand.

[0088] In one embodiment, the invention features a siNA molecule, wherein the antisense strand comprises one or more, for example, about 1, 2, 3, 4, 5, 6, 7, 8, 9, 10, or more phosphorothioate internucleotide linkages, and/or about one or more (e.g., about 1, 2, 3, 4, 5, 6, 7, 8, 9, 10 or more) 2′-deoxy, 2′-O-methyl, 2′-deoxy-2′-fluoro, 2′-O-trifluoromethyl, 2′-O-ethyl-trifluoromethoxy, 2′-O-difluoromethoxy-ethoxy, 4′-thio and/or one or more (e.g., about 1, 2, 3, 4, 5, 6, 7, 8, 9, 10 or more) universal base modified nucleotides, and optionally a terminal cap molecule at the 3′-end, the 5′-end, or both of the 3′- and 5′-ends of the sense strand; and wherein the antisense strand comprises about 1 to about 10 or more, specifically about 1, 2, 3, 4, 5, 6, 7, 8, 9, 10 or more phosphorothioate internucleotide linkages, and/or one or more (e.g., about 1, 2, 3, 4, 5, 6, 7, 8, 9, 10 or more) 2′-deoxy, 2′-O-methyl, 2′-deoxy-2′-fluoro, 2′-O-trifluoromethyl, 2′-O-ethyl-trifluoromethoxy, 2′-O-difluoromethoxy-ethoxy, 4′-thio and/or one or more (e.g., about 1, 2, 3, 4, 5, 6, 7, 8, 9, 10 or more) universal base modified nucleotides, and optionally a terminal cap molecule at the 3′-end, the 5′-end, or both of the 3′- and 5′-ends of the antisense strand. In another embodiment, one or more, for example about 1, 2, 3, 4, 5, 6, 7, 8, 9, 10 or more pyrimidine nucleotides of the sense and/or antisense siNA strand are chemically-modified with 2′-deoxy, 2′-O-methyl, 2′-O-trifluoromethyl, 2′-O-ethyl-trifluoromethoxy, 2′-O-difluoromethoxy-ethoxy, 4′-thio and/or 2′-deoxy-2′-fluoro nucleotides, with or without one or more, for example, about 1, 2, 3, 4, 5, 6, 7, 8, 9, 10 or more phosphorothioate internucleotide linkages and/or a terminal cap molecule at the 3′-end, the 5′-end, or both of the 3′ and 5′-ends, being present in the same or different strand.

[0089] In another embodiment, the invention features a siNA molecule, wherein the antisense strand comprises about 1 to about 5 or more, specifically about 1, 2, 3, 4, 5 or more phosphorothioate internucleotide linkages, and/or one or more (e.g., about 1, 2, 3, 4, 5, 6, 7, 8, 9, 10 or more) 2′-deoxy, 2′-O-methyl, 2′-deoxy-2′-fluoro, 2′-O-trifluoromethyl, 2′-O-ethyl-trifluoromethoxy, 2′-O-difluoromethoxy-ethoxy, 4′-thio and/or one or more (e.g., about 1, 2, 3, 4, 5, 6, 7, 8, 9, 10 or more) universal base modified nucleotides, and optionally a terminal cap molecule at the 3′-end, the 5′-end, or both of the 3′- and 5′-ends of the sense strand; and wherein the antisense strand comprises about 1 to about 5 or more, specifically about 1, 2, 3, 4, 5 or more phosphorothioate internucleotide linkages, and/or one or more (e.g., about 1, 2, 3, 4, 5, 6, 7, 8, 9, 10 or more) 2′-deoxy, 2′-O-methyl, 2′-deoxy-2′-fluoro, 2′-O-trifluoromethyl, 2′-O-ethyl-trifluoromethoxy, 2′-O-difluoromethoxy-ethoxy, 4′-thio and/or one or more (e.g., about 1, 2, 3, 4, 5, 6, 7, 8, 9, 10 or more) universal base modified nucleotides, and optionally a terminal cap molecule at the 3′-end, the 5′-end, or both of the 3′- and 5′-ends of the antisense strand. In another embodiment, one or more, for example about 1, 2, 3, 4, 5, 6, 7, 8, 9, 10 or more pyrimidine nucleotides of the sense and/or antisense siNA strand are chemically-modified with 2′-deoxy, 2′-O-methyl, 2′-O-trifluoromethyl, 2′-O-ethyl-trifluoromethoxy, 2′-O-difluoromethoxy-ethoxy, 4′-thio and/or 2′-deoxy-2′-fluoro nucleotides, with or without about 1 to about 5, for example about 1, 2, 3, 4, 5 or more phosphorothioate internucleotide linkages and/or a terminal cap molecule at the 3′-end, the 5′-end, or both of the 3′- and 5′-ends, being present in the same or different strand.

[0090] In one embodiment, the invention features a chemically-modified short interfering nucleic acid (siNA) molecule having about 1 to about 5 or more (specifically about 1, 2, 3, 4, 5 or more) phosphorothioate internucleotide linkages in each strand of the siNA molecule.

[0091] In another embodiment, the invention features a siNA molecule comprising 2′-5′ internucleotide linkages. The 2′-5′ internucleotide linkage(s) can be at the 3′-end, the 5′-end, or both of the 3′- and 5′-ends of one or both siNA sequence strands. In addition, the 2′-5′ internucleotide linkage(s) can be present at various other positions within one or both siNA sequence strands, for example, about 1, 2, 3, 4, 5, 6, 7, 8, 9, 10, or more including every internucleotide linkage of a pyrimidine nucleotide in one or both strands of the siNA molecule can comprise a 2′-5′ internucleotide linkage, or about 1, 2, 3, 4, 5, 6, 7, 8, 9, 10, or more including every internucleotide linkage of a purine nucleotide in one or both strands of the siNA molecule can comprise a 2′-5′ internucleotide linkage.

[0092] In another embodiment, a chemically-modified siNA molecule of the invention comprises a duplex having two strands, one or both of which can be chemically-modified, wherein each strand is independently about 15 to about 30 (e.g., about 15, 16, 17, 18, 19, 20, 21, 22, 23, 24, 25, 26, 27, 28, 29, or 30) nucleotides in length, wherein the duplex has about 15 to about 30 (e.g., about 15, 16, 17, 18, 19, 20, 21, 22, 23, 24, 25, 26, 27, 28, 29, or 30) base pairs, and wherein the chemical modification comprises a structure having any of Formulae I-VII. For example, an exemplary chemically-modified siNA molecule of the invention comprises a duplex having two strands, one or both of which can be chemically-modified with a chemical modification having any of Formulae I-VII or any combination thereof, wherein each strand consists of about 21 nucleotides, each having a 2-nucleotide 3′-terminal nucleotide overhang, and wherein the duplex has about 19 base pairs. In another embodiment, a siNA molecule of the invention comprises a single stranded hairpin structure, wherein the siNA is about 36 to about 70 (e.g., about 36, 40, 45, 50, 55, 60, 65, or 70) nucleotides in length having about 15 to about 30 (e.g., about 15, 16, 17, 18, 19, 20, 21, 22, 23, 24, 25, 26, 27, 28, 29, or 30) base pairs, and wherein the siNA can include a chemical modification comprising a structure having any of Formulae I-VII or any combination thereof. For example, an exemplary chemically-modified siNA molecule of the invention comprises a linear oligonucleotide having about 42 to about 50 (e.g., about 42, 43, 44, 45, 46, 47, 48, 49, or 50) nucleotides that is chemically-modified with a chemical modification having any of Formulae I-VII or any combination thereof, wherein the linear oligonucleotide forms a hairpin structure having about 19 to about 21 (e.g., 19, 20, or 21) base pairs and a 2-nucleotide 3′-terminal nucleotide overhang. In another embodiment, a linear hairpin siNA molecule of the invention contains a stem loop motif, wherein the loop portion of the siNA molecule is biodegradable. For example, a linear hairpin siNA molecule of the invention is designed such that degradation of the loop portion of the siNA molecule in vivo can generate a double-stranded siNA molecule with 3′-terminal overhangs, such as 3′-terminal nucleotide overhangs comprising about 2 nucleotides.

[0093] In another embodiment, a siNA molecule of the invention comprises a hairpin structure, wherein the siNA is about 25 to about 50 (e.g., about 25, 26, 27, 28, 29, 30, 31, 32, 33, 34, 35, 36, 37, 38, 39, 40, 41, 42, 43, 44, 45, 46, 47, 48, 49, or 50) nucleotides in length having about 3 to about 25 (e.g., about 3, 4, 5, 6, 7, 8, 9, 10, 11, 12, 13, 14, 15, 16, 17, 18, 19, 20, 21, 22, 23, 24, or 25) base pairs, and wherein the siNA can include one or more chemical modifications comprising a structure having any of Formulae I-VII or any combination thereof. For example, an exemplary chemically-modified siNA molecule of the invention comprises a linear oligonucleotide having about 25 to about 35 (e.g., about 25, 26, 27, 28, 29, 30, 31, 32, 33, 34, or 35) nucleotides that is chemically-modified with one or more chemical modifications having any of Formulae I-VII or any combination thereof, wherein the linear oligonucleotide forms a hairpin structure having about 3 to about 25 (e.g., about 3, 4, 5, 6, 7, 8, 9, 10, 11, 12, 13, 14, 15, 16, 17, 18, 19, 20, 21, 22, 23, 24, or 25) base pairs and a 5′-terminal phosphate group that can be chemically modified as described herein (for example a 5′-terminal phosphate group having Formula IV). In another embodiment, a linear hairpin siNA molecule of the invention contains a stem loop motif, wherein the loop portion of the siNA molecule is biodegradable. In one embodiment, a linear hairpin siNA molecule of the invention comprises a loop portion comprising a non-nucleotide linker.

[0094] In another embodiment, a siNA molecule of the invention comprises an asymmetric hairpin structure, wherein the siNA is about 25 to about 50 (e.g., about 25, 26, 27, 28, 29, 30, 31, 32, 33, 34, 35, 36, 37, 38, 39, 40, 41, 42, 43, 44, 45, 46, 47, 48, 49, or 50) nucleotides in length having about 3 to about 25 (e.g., about 3, 4, 5, 6, 7, 8, 9, 10, 11, 12, 13, 14, 15, 16, 17, 18, 19, 20, 21, 22, 23, 24, or 25) base pairs, and wherein the siNA can include one or more chemical modifications comprising a structure having any of Formulae I-VII or any combination thereof. For example, an exemplary chemically-modified siNA molecule of the invention comprises a linear oligonucleotide having about 25 to about 35 (e.g., about 25, 26, 27, 28, 29, 30, 31, 32, 33, 34, or 35) nucleotides that is chemically-modified with one or more chemical modifications having any of Formulae I-VII or any combination thereof, wherein the linear oligonucleotide forms an asymmetric hairpin structure having about 3 to about 25 (e.g., about 3, 4, 5, 6, 7, 8, 9, 10, 11, 12, 13, 14, 15, 16, 17, 18, 19, 20, 21, 22, 23, 24, or 25) base pairs and a 5′-terminal phosphate group that can be chemically modified as described herein (for example a 5′-terminal phosphate group having Formula IV). In one embodiment, an asymmetric hairpin siNA molecule of the invention contains a stem loop motif, wherein the loop portion of the siNA molecule is biodegradable. In another embodiment, an asymmetric hairpin siNA molecule of the invention comprises a loop portion comprising a non-nucleotide linker.

[0095] In another embodiment, a siNA molecule of the invention comprises an asymmetric double stranded structure having separate polynucleotide strands comprising sense and antisense regions, wherein the antisense region is about 15 to about 30 (e.g., about 15, 16, 17, 18, 19, 20, 21, 22, 23, 24, 25, 26, 27, 28, 29, or 30) nucleotides in length, wherein the sense region is about 3 to about 25 (e.g., about 3, 4, 5, 6, 7, 8, 9, 10, 11, 12, 13, 14, 15, 16, 17, 18, 19, 20, 21, 22, 23, 24, or 25) nucleotides in length, wherein the sense region and the antisense region have at least 3 complementary nucleotides, and wherein the siNA can include one or more chemical modifications comprising a structure having any of Formulae I-VII or any combination thereof. For example, an exemplary chemically-modified siNA molecule of the invention comprises an asymmetric double stranded structure having separate polynucleotide strands comprising sense and antisense regions, wherein the antisense region is about 18 to about 23 (e.g., about 18, 19, 20, 21, 22, or 23) nucleotides in length and wherein the sense region is about 3 to about 15 (e.g., about 3, 4, 5, 6, 7, 8, 9, 10, 11, 12, 13, 14, or 15) nucleotides in length, wherein the sense region the antisense region have at least 3 complementary nucleotides, and wherein the siNA can include one or more chemical modifications comprising a structure having any of Formulae I-VII or any combination thereof. In another embodiment, the asymmetric double stranded siNA molecule can also have a 5′-terminal phosphate group that can be chemically modified as described herein (for example a 5′-terminal phosphate group having Formula IV).

[0096] In another embodiment, a siNA molecule of the invention comprises a circular nucleic acid molecule, wherein the siNA is about 38 to about 70 (e.g., about 38, 40, 45, 50, 55, 60, 65, or 70) nucleotides in length having about 15 to about 30 (e.g., about 15, 16, 17, 18, 19, 20, 21, 22, 23, 24, 25, 26, 27, 28, 29, or 30) base pairs, and wherein the siNA can include a chemical modification, which comprises a structure having any of Formulae I-VII or any combination thereof. For example, an exemplary chemically-modified siNA molecule of the invention comprises a circular oligonucleotide having about 42 to about 50 (e.g., about 42, 43, 44, 45, 46, 47, 48, 49, or 50) nucleotides that is chemically-modified with a chemical modification having any of Formulae I-VII or any combination thereof, wherein the circular oligonucleotide forms a dumbbell shaped structure having about 19 base pairs and 2 loops.

[0097] In another embodiment, a circular siNA molecule of the invention contains two loop motifs, wherein one or both loop portions of the siNA molecule is biodegradable. For example, a circular siNA molecule of the invention is designed such that degradation of the loop portions of the siNA molecule in vivo can generate a double-stranded siNA molecule with 3′-terminal overhangs, such as 3′-terminal nucleotide overhangs comprising about 2 nucleotides.

[0098] In one embodiment, a siNA molecule of the invention comprises at least one (e.g., about 1, 2, 3, 4, 5, 6, 7, 8, 9, 10, or more) abasic moiety, for example a compound having Formula V: [chemical structure]
wherein each R3, R4, R5, R6, R7, R8, R10, R11, R12, and R13 is independently H, OH, alkyl, substituted alkyl, alkaryl or aralkyl, F, Cl, Br, CN, CF3, OCF3, OCN, O-alkyl, S-alkyl, N-alkyl, O-alkenyl, S-alkenyl, N-alkenyl, SO-alkyl, alkyl-OSH, alkyl-OH, O-alkyl-OH, O-alkyl-SH, S-alkyl-OH, S-alkyl-SH, alkyl-S-alkyl, alkyl-O-alkyl, ONO2, NO2, N3, NH2, aminoalkyl, aminoacid, aminoacyl, ONH2, O-aminoalkyl, O-aminoacid, O-aminoacyl, heterocycloalkyl, heterocycloalkaryl, aminoalkylamino, polyalklylamino, substituted silyl, or group having Formula I or II; R9 is O, S, CH2, S═O, CHF, or CF2. In one embodiment, R3 and/or R7 comprises a conjugate moiety and a linker (e.g., a nucleotide or non-nucleotide linker as described herein or otherwise known in the art). Non-limiting examples of conjugate moieties include ligands for cellular receptors, such as peptides derived from naturally occurring protein ligands; protein localization sequences, including cellular ZIP code sequences; antibodies; nucleic acid aptamers; vitamins and other co-factors, such as folate and N-acetylgalactosamine; polymers, such as polyethyleneglycol (PEG); phospholipids; cholesterol; steroids, and polyamines, such as PEI, spermine or spermidine.

[0099] In one embodiment, a siNA molecule of the invention comprises at least one (e.g., about 1, 2, 3, 4, 5, 6, 7, 8, 9, 10, or more) inverted abasic moiety, for example a compound having Formula VI: [chemical structure]
wherein each R3, R4, R5, R6, R7, R8, R10, R11, R12, and R13 is independently H, OH, alkyl, substituted alkyl, alkaryl or aralkyl, F, Cl, Br, CN, CF3, OCF3, OCN, O-alkyl, S-alkyl, N-alkyl, O-alkenyl, S-alkenyl, N-alkenyl, SO-alkyl, alkyl-OSH, alkyl-OH, O-alkyl-OH, O-alkyl-SH, S-alkyl-OH, S-alkyl-SH, alkyl-S-alkyl, alkyl-O-alkyl, ONO2, NO2, N3, NH2, aminoalkyl, aminoacid, aminoacyl, ONH2, O-aminoalkyl, O-aminoacid, O-aminoacyl, heterocycloalkyl, heterocycloalkaryl, aminoalkylamino, polyalklylamino, substituted silyl, or group having Formula I or II; R9 is O, S, CH2, S═O, CHF, or CF2, and either R2, R3, R8 or R13 serve as points of attachment to the siNA molecule of the invention. In one embodiment, R3 and/or R7 comprises a conjugate moiety and a linker (e.g., a nucleotide or non-nucleotide linker as described herein or otherwise known in the art). Non-limiting examples of conjugate moieties include ligands for cellular receptors, such as peptides derived from naturally occurring protein ligands; protein localization sequences, including cellular ZIP code sequences; antibodies; nucleic acid aptamers; vitamins and other co-factors, such as folate and N-acetylgalactosamine; polymers, such as polyethyleneglycol (PEG); phospholipids; cholesterol; steroids, and polyamines, such as PEI, spermine or spermidine.

[0100] In another embodiment, a siNA molecule of the invention comprises at least one (e.g., about 1, 2, 3, 4, 5, 6, 7, 8, 9, 10, or more) substituted polyalkyl moieties, for example a compound having Formula VII: [chemical structure]
wherein each n is independently an integer from 1 to 12, each R1, R2 and R3 is independently H, OH, alkyl, substituted alkyl, alkaryl or aralkyl, F, Cl, Br, CN, CF3, OCF3, OCN, O-alkyl, S-alkyl, N-alkyl, O-alkenyl, S-alkenyl, N-alkenyl, SO-alkyl, alkyl-OSH, alkyl-OH, O-alkyl-OH, O-alkyl-SH, S-alkyl-OH, S-alkyl-SH, alkyl-S-alkyl, alkyl-O-alkyl, ONO2, NO2, N3, NH2, aminoalkyl, aminoacid, aminoacyl, ONH2, O-aminoalkyl, O-aminoacid, O-aminoacyl, heterocycloalkyl, heterocycloalkaryl, aminoalkylamino, polyalklylamino, substituted silyl, or a group having Formula I, and R1, R2 or R3 serves as points of attachment to the siNA molecule of the invention. In one embodiment, R3 and/or R1 comprises a conjugate moiety and a linker (e.g., a nucleotide or non-nucleotide linker as described herein or otherwise known in the art). Non-limiting examples of conjugate moieties include ligands for cellular receptors, such as peptides derived from naturally occurring protein ligands; protein localization sequences, including cellular ZIP code sequences; antibodies; nucleic acid aptamers; vitamins and other co-factors, such as folate and N-acetylgalactosamine; polymers, such as polyethyleneglycol (PEG); phospholipids; cholesterol; steroids, and polyamines, such as PEI, spermine or spermidine.

[0101] By “ZIP code” sequences is meant, any peptide or protein sequence that is involved in cellular topogenic signaling mediated transport (see for example Ray et al., 2004, Science, 306(1501): 1505)

[0102] Each nucleotide within the double stranded siNA molecule can independently have a chemical modification comprising the structure of any of Formulae I-VIII. Thus, in one embodiment, one or more nucleotide positions of a siNA molecule of the invention comprises a chemical modification having structure of any of Formulae I-VII or any other modification herein. In one embodiment, each nucleotide position of a siNA molecule of the invention comprises a chemical modification having structure of any of Formulae I-VII or any other modification herein.

[0103] In one embodiment, one or more nucleotide positions of one or both strands of a double stranded siNA molecule of the invention comprises a chemical modification having structure of any of Formulae I-VII or any other modification herein. In one embodiment, each nucleotide position of one or both strands of a double stranded siNA molecule of the invention comprises a chemical modification having structure of any of Formulae I-VII or any other modification herein.

[0104] In another embodiment, the invention features a compound having Formula VII, wherein R1 and R2 are hydroxyl (OH) groups, n=1, and R3 comprises O and is the point of attachment to the 3′-end, the 5′-end, or both of the 3′ and 5′-ends of one or both strands of a double-stranded siNA molecule of the invention or to a single-stranded siNA molecule of the invention. This modification is referred to herein as “glyceryl” (for example modification 6 in FIG. 10).

[0105] In another embodiment, a chemically modified nucleoside or non-nucleoside (e.g. a moiety having any of Formula V, VI or VII) of the invention is at the 3′-end, the 5′-end, or both of the 3′ and 5′-ends of a siNA molecule of the invention. For example, chemically modified nucleoside or non-nucleoside (e.g., a moiety having Formula V, VI or VII) can be present at the 3′-end, the 5′-end, or both of the 3′ and 5′-ends of the antisense strand, the sense strand, or both antisense and sense strands of the siNA molecule. In one embodiment, the chemically modified nucleoside or non-nucleoside (e.g., a moiety having Formula V, VI or VII) is present at the 5′-end and 3′-end of the sense strand and the 3′-end of the antisense strand of a double stranded siNA molecule of the invention. In one embodiment, the chemically modified nucleoside or non-nucleoside (e.g., a moiety having Formula V, VI or VII) is present at the terminal position of the 5′-end and 3′-end of the sense strand and the 3′-end of the antisense strand of a double stranded siNA molecule of the invention. In one embodiment, the chemically modified nucleoside or non-nucleoside (e.g., a moiety having Formula V, VI or VII) is present at the two terminal positions of the 5′-end and 3′-end of the sense strand and the 3′-end of the antisense strand of a double stranded siNA molecule of the invention. In one embodiment, the chemically modified nucleoside or non-nucleoside (e.g., a moiety having Formula V, VI or VII) is present at the penultimate position of the 5′-end and 3′-end of the sense strand and the 3′-end of the antisense strand of a double stranded siNA molecule of the invention. In addition, a moiety having Formula VII can be present at the 3′-end or the 5′-end of a hairpin siNA molecule as described herein.

[0106] In another embodiment, a siNA molecule of the invention comprises an abasic residue having Formula V or VI, wherein the abasic residue having Formula VI or VI is connected to the siNA construct in a 3′-3′,3′-2′,2′-3′, or 5′-5′ configuration, such as at the 3′-end, the 5′-end, or both of the 3′ and 5′-ends of one or both siNA strands.

[0107] In one embodiment, a siNA molecule of the invention comprises one or more (e.g., about 1, 2, 3, 4, 5, 6, 7, 8, 9, 10, or more) locked nucleic acid (LNA) nucleotides, for example, at the 5′-end, the 3′-end, both of the 5′ and 3′-ends, or any combination thereof, of the siNA molecule.

[0108] In one embodiment, a siNA molecule of the invention comprises one or more (e.g., about 1, 2, 3, 4, 5, 6, 7, 8, 9, 10, or more) 4′-thio nucleotides, for example, at the 5′-end, the 3′-end, both of the 5′ and 3′-ends, or any combination thereof, of the siNA molecule.

[0109] In another embodiment, a siNA molecule of the invention comprises one or more (e.g., about 1, 2, 3, 4, 5, 6, 7, 8, 9, 10, or more) acyclic nucleotides, for example, at the 5′-end, the 3′-end, both of the 5′ and 3′-ends, or any combination thereof, of the siNA molecule.

[0110] In one embodiment, the invention features a chemically-modified short interfering nucleic acid (siNA) molecule of the invention comprising a sense region, wherein any (e.g., one or more or all) pyrimidine nucleotides present in the sense region are 2′-deoxy-2′-fluoro pyrimidine nucleotides (e.g., wherein all pyrimidine nucleotides are 2′-deoxy-2′-fluoro pyrimidine nucleotides or alternately a plurality of pyrimidine nucleotides are 2′-deoxy-2′-fluoro pyrimidine nucleotides), and wherein any (e.g., one or more or all) purine nucleotides present in the sense region are 2′-deoxy purine nucleotides (e.g., wherein all purine nucleotides are 2′-deoxy purine nucleotides or alternately a plurality of purine nucleotides are 2′-deoxy purine nucleotides).

[0111] In one embodiment, the invention features a chemically-modified short interfering nucleic acid (siNA) molecule of the invention comprising a sense region, wherein any (e.g., one or more or all) pyrimidine nucleotides present in the sense region are 2′-deoxy-2′-fluoro, 4′-thio, 2′-O-trifluoromethyl, 2′-O-ethyl-trifluoromethoxy, or 2′-O-difluoromethoxy-ethoxy pyrimidine nucleotides (e.g., wherein all pyrimidine nucleotides are 2′-deoxy-2′-fluoro, 4′-thio, 2′-O-trifluoromethyl, 2′-O-ethyl-trifluoromethoxy, or 2′-O-difluoromethoxy-ethoxy pyrimidine nucleotides or alternately a plurality of pyrimidine nucleotides are 2′-deoxy-2′-fluoro, 4′-thio, 2′-O-trifluoromethyl, 2′-O-ethyl-trifluoromethoxy, or 2′-O-difluoromethoxy-ethoxy pyrimidine nucleotides), and wherein any (e.g., one or more or all) purine nucleotides present in the sense region are 2′-deoxy purine nucleotides (e.g., wherein all purine nucleotides are 2′-deoxy purine nucleotides or alternately a plurality of purine nucleotides are 2′-deoxy purine nucleotides), wherein any nucleotides comprising a 3′-terminal nucleotide overhang that are present in said sense region are 2′-deoxy nucleotides.

[0112] In one embodiment, the invention features a chemically-modified short interfering nucleic acid (siNA) molecule of the invention comprising a sense region, wherein any (e.g., one or more or all) pyrimidine nucleotides present in the sense region are 2′-deoxy-2′-fluoro, 4′-thio, 2′-O-trifluoromethyl, 2′-O-ethyl-trifluoromethoxy, or 2′-O-difluoromethoxy-ethoxy pyrimidine nucleotides (e.g., wherein all pyrimidine nucleotides are 2′-deoxy-2′-fluoro, 4′-thio, 2′-O-trifluoromethyl, 2′-O-ethyl-trifluoromethoxy, or 2′-O-difluoromethoxy-ethoxy pyrimidine nucleotides or alternately a plurality of pyrimidine nucleotides are 2′-deoxy-2′-fluoro, 4′-thio, 2′-O-trifluoromethyl, 2′-O-ethyl-trifluoromethoxy, or 2′-O-difluoromethoxy-ethoxy pyrimidine nucleotides), and wherein any (e.g., one or more or all) purine nucleotides present in the sense region are 2′-O-methyl purine nucleotides (e.g., wherein all purine nucleotides are 2′-O-methyl, 4′-thio, 2′-O-trifluoromethyl, 2′-O-ethyl-trifluoromethoxy, or 2′-O-difluoromethoxy-ethoxy purine nucleotides or alternately a plurality of purine nucleotides are 2′-O-methyl, 4′-thio, 2′-O-trifluoromethyl, 2′-O-ethyl-trifluoromethoxy, or 2′-O-difluoromethoxy-ethoxy purine nucleotides).

[0113] In one embodiment, the invention features a chemically-modified short interfering nucleic acid (siNA) molecule of the invention comprising a sense region, wherein any (e.g., one or more or all) pyrimidine nucleotides present in the sense region are 2′-deoxy-2′-fluoro, 4′-thio, 2′-O-trifluoromethyl, 2′-O-ethyl-trifluoromethoxy, or 2′-O-difluoromethoxy-ethoxy pyrimidine nucleotides (e.g., wherein all pyrimidine nucleotides are 2′-deoxy-2′-fluoro, 4′-thio, 2′-O-trifluoromethyl, 2′-O-ethyl-trifluoromethoxy, or 2′-O-difluoromethoxy-ethoxy pyrimidine nucleotides or alternately a plurality of pyrimidine nucleotides are 2′-deoxy-2′-fluoro, 4′-thio, 2′-O-trifluoromethyl, 2′-O-ethyl-trifluoromethoxy, or 2′-O-difluoromethoxy-ethoxy pyrimidine nucleotides), wherein any (e.g., one or more or all) purine nucleotides present in the sense region are 2′-O-methyl, 4′-thio, 2′-O-trifluoromethyl, 2′-O-ethyl-trifluoromethoxy, or 2′-O-difluoromethoxy-ethoxy purine nucleotides (e.g., wherein all purine nucleotides are 2′-O-methyl, 4′-thio, 2′-O-trifluoromethyl, 2′-O-ethyl-trifluoromethoxy, or 2′-O-difluoromethoxy-ethoxy purine nucleotides or alternately a plurality of purine nucleotides are 2′-O-methyl, 4′-thio, 2′-O-trifluoromethyl, 2′-O-ethyl-trifluoromethoxy, or 2′-O-difluoromethoxy-ethoxy purine nucleotides), and wherein any nucleotides comprising a 3′-terminal nucleotide overhang that are present in said sense region are 2′-deoxy nucleotides.

[0114] In one embodiment, the invention features a chemically-modified short interfering nucleic acid (siNA) molecule of the invention comprising an antisense region, wherein any (e.g., one or more or all) pyrimidine nucleotides present in the antisense region are 2′-deoxy-2′-fluoro, 4′-thio, 2′-O-trifluoromethyl, 2′-O-ethyl-trifluoromethoxy, or 2′-O-difluoromethoxy-ethoxy pyrimidine nucleotides (e.g. wherein all pyrimidine nucleotides are 2′-deoxy-2′-fluoro, 4′-thio, 2′-O-trifluoromethyl, 2′-O-ethyl-trifluoromethoxy, or 2′-O-difluoromethoxy-ethoxy pyrimidine nucleotides or alternately a plurality of pyrimidine nucleotides are 2′-deoxy-2′-fluoro, 4′-thio, 2′-O-trifluoromethyl, 2′-O-ethyl-trifluoromethoxy, or 2′-O-difluoromethoxy-ethoxy pyrimidine nucleotides), and wherein any (e.g., one or more or all) purine nucleotides present in the antisense region are 2′-O-methyl, 4′-thio, 2′-O-trifluoromethyl, 2′-O-ethyl-trifluoromethoxy, or 2′-O-difluoromethoxy-ethoxy purine nucleotides (e.g., wherein all purine nucleotides are 2′-O-methyl, 4′-thio, 2′-O-trifluoromethyl, 2′-O-ethyl-trifluoromethoxy, or 2′-O-difluoromethoxy-ethoxy purine nucleotides or alternately a plurality of purine nucleotides are 2′-O-methyl, 4′-thio, 2′-O-trifluoromethyl, 2′-O-ethyl-trifluoromethoxy, or 2′-O-difluoromethoxy-ethoxy purine nucleotides).

[0115] In one embodiment, the invention features a chemically-modified short interfering nucleic acid (siNA) molecule of the invention comprising an antisense region, wherein any (e.g., one or more or all) pyrimidine nucleotides present in the antisense region are 2′-deoxy-2′-fluoro, 4′-thio, 2′-O-trifluoromethyl, 2′-O-ethyl-trifluoromethoxy, or 2′-O-difluoromethoxy-ethoxy pyrimidine nucleotides (e.g., wherein all pyrimidine nucleotides are 2′-deoxy-2′-fluoro, 4′-thio, 2′-O-trifluoromethyl, 2′-O-ethyl-trifluoromethoxy, or 2′-O-difluoromethoxy-ethoxy pyrimidine nucleotides or alternately a plurality of pyrimidine nucleotides are 2′-deoxy-2′-fluoro, 4′-thio, 2′-O-trifluoromethyl, 2′-O-ethyl-trifluoromethoxy, or 2′-O-difluoromethoxy-ethoxy pyrimidine nucleotides), wherein any (e.g., one or more or all) purine nucleotides present in the antisense region are 2′-O-methyl, 4′-thio, 2′-O-trifluoromethyl, 2′-O-ethyl-trifluoromethoxy, or 2′-O-difluoromethoxy-ethoxy purine nucleotides (e.g., wherein all purine nucleotides are 2′-O-methyl, 4′-thio, 2′-O-trifluoromethyl, 2′-O-ethyl-trifluoromethoxy, or 2′-O-difluoromethoxy-ethoxy purine nucleotides or alternately a plurality of purine nucleotides are 2′-O-methyl, 4′-thio, 2′-O-trifluoromethyl, 2′-O-ethyl-trifluoromethoxy, or 2′-O-difluoromethoxy-ethoxy purine nucleotides), and wherein any nucleotides comprising a 3′-terminal nucleotide overhang that are present in said antisense region are 2′-deoxy nucleotides.

[0116] In one embodiment, the invention features a chemically-modified short interfering nucleic acid (siNA) molecule of the invention comprising an antisense region, wherein any (e.g., one or more or all) pyrimidine nucleotides present in the antisense region are 2′-deoxy-2′-fluoro, 4′-thio, 2′-O-trifluoromethyl, 2′-O-ethyl-trifluoromethoxy, or 2′-O-difluoromethoxy-ethoxy pyrimidine nucleotides (e.g., wherein all pyrimidine nucleotides are 2′-deoxy-2′-fluoro, 4′-thio, 2′-O-trifluoromethyl, 2′-O-ethyl-trifluoromethoxy, or 2′-O-difluoromethoxy-ethoxy pyrimidine nucleotides or alternately a plurality of pyrimidine nucleotides are 2′-deoxy-2′-fluoro, 4′-thio, 2′-O-trifluoromethyl, 2′-O-ethyl-trifluoromethoxy, or 2′-O-difluoromethoxy-ethoxy pyrimidine nucleotides), and wherein any (e.g., one or more or all) purine nucleotides present in the antisense region are 2′-deoxy purine nucleotides (e.g., wherein all purine nucleotides are 2′-deoxy purine nucleotides or alternately a plurality of purine nucleotides are 2′-deoxy purine nucleotides).

[0117] In one embodiment, the invention features a chemically-modified short interfering nucleic acid (siNA) molecule of the invention comprising an antisense region, wherein any (e.g., one or more or all) pyrimidine nucleotides present in the antisense region are 2′-deoxy-2′-fluoro, 4′-thio, 2′-O-trifluoromethyl, 2′-O-ethyl-trifluoromethoxy, or 2′-O-difluoromethoxy-ethoxy pyrimidine nucleotides (e.g., wherein all pyrimidine nucleotides are 2′-deoxy-2′-fluoro, 4′-thio, 2′-O-trifluoromethyl, 2′-O-ethyl-trifluoromethoxy, or 2′-O-difluoromethoxy-ethoxy pyrimidine nucleotides or alternately a plurality of pyrimidine nucleotides are 2′-deoxy-2′-fluoro, 4′-thio, 2′-O-trifluoromethyl, 2′-O-ethyl-trifluoromethoxy, or 2′-O-difluoromethoxy-ethoxy pyrimidine nucleotides), and wherein any (e.g., one or more or all) purine nucleotides present in the antisense region are 2′-O-methyl, 4′-thio, 2′-O-trifluoromethyl, 2′-O-ethyl-trifluoromethoxy, or 2′-O-difluoromethoxy-ethoxy purine nucleotides (e.g., wherein all purine nucleotides are 2′-O-methyl, 4′-thio, 2′-O-trifluoromethyl, 2′-O-ethyl-trifluoromethoxy, or 2′-O-difluoromethoxy-ethoxy purine nucleotides or alternately a plurality of purine nucleotides are 2′-O-methyl, 4′-thio, 2′-O-trifluoromethyl, 2′-O-ethyl-trifluoromethoxy, or 2′-O-difluoromethoxy-ethoxy purine nucleotides).

[0118] In one embodiment, the invention features a chemically-modified short interfering nucleic acid (siNA) molecule of the invention capable of mediating RNA interference (RNAi) inside a cell or reconstituted in vitro system comprising a sense region, wherein one or more pyrimidine nucleotides present in the sense region are 2′-deoxy-2′-fluoro, 4′-thio, 2′-O-trifluoromethyl, 2′-O-ethyl-trifluoromethoxy, or 2′-O-difluoromethoxy-ethoxy pyrimidine nucleotides (e.g., wherein all pyrimidine nucleotides are 2′-deoxy-2′-fluoro, 4′-thio, 2′-O-trifluoromethyl, 2′-O-ethyl-trifluoromethoxy, or 2′-O-difluoromethoxy-ethoxy pyrimidine nucleotides or alternately a plurality of pyrimidine nucleotides are 2′-deoxy-2′-fluoro, 4′-thio, 2′-O-trifluoromethyl, 2′-O-ethyl-trifluoromethoxy, or 2′-O-difluoromethoxy-ethoxy pyrimidine nucleotides), and one or more purine nucleotides present in the sense region are 2′-deoxy purine nucleotides (e.g., wherein all purine nucleotides are 2′-deoxy purine nucleotides or alternately a plurality of purine nucleotides are 2′-deoxy purine nucleotides), and an antisense region, wherein one or more pyrimidine nucleotides present in the antisense region are 2′-deoxy-2′-fluoro, 4′-thio, 2′-O-trifluoromethyl, 2′-O-ethyl-trifluoromethoxy, or 2′-O-difluoromethoxy-ethoxy pyrimidine nucleotides (e.g., wherein all pyrimidine nucleotides are 2′-deoxy-2′-fluoro, 4′-thio, 2′-O-trifluoromethyl, 2′-O-ethyl-trifluoromethoxy, or 2′-O-difluoromethoxy-ethoxy pyrimidine nucleotides or alternately a plurality of pyrimidine nucleotides are 2′-deoxy-2′-fluoro, 4′-thio, 2′-O-trifluoromethyl, 2′-O-ethyl-trifluoromethoxy, or 2′-O-difluoromethoxy-ethoxy pyrimidine nucleotides), and one or more purine nucleotides present in the antisense region are 2′-O-methyl, 4′-thio, 2′-O-trifluoromethyl, 2′-O-ethyl-trifluoromethoxy, or 2′-O-difluoromethoxy-ethoxy purine nucleotides (e.g., wherein all purine nucleotides are 2′-O-methyl, 4′-thio, 2′-O-trifluoromethyl, 2′-O-ethyl-trifluoromethoxy, or 2′-O-difluoromethoxy-ethoxy purine nucleotides or alternately a plurality of purine nucleotides are 2′-O-methyl, 4′-thio, 2′-O-trifluoromethyl, 2′-O-ethyl-trifluoromethoxy, or 2′-O-difluoromethoxy-ethoxy purine nucleotides). The sense region and/or the antisense region can have a terminal cap modification, such as any modification described herein or shown in FIG. 10, that is optionally present at the 3′-end, the 5′-end, or both of the 3′ and 5′-ends of the sense and/or antisense sequence. The sense and/or antisense region can optionally further comprise a 3′-terminal nucleotide overhang having about 1 to about 4 (e.g., about 1, 2, 3, or 4) 2′-deoxynucleotides. The overhang nucleotides can further comprise one or more (e.g., about 1, 2, 3, 4 or more) phosphorothioate, phosphonoacetate, and/or thiophosphonoacetate internucleotide linkages. Non-limiting examples of these chemically-modified siNAs are shown in FIGS. 4 and 5 and Tables III and IV herein. In any of these described embodiments, the purine nucleotides present in the sense region are alternatively 2′-O-methyl, 4′-thio, 2′-O-trifluoromethyl, 2′-O-ethyl-trifluoromethoxy, or 2′-O-difluoromethoxy-ethoxy purine nucleotides (e.g., wherein all purine nucleotides are 2′-O-methyl, 4′-thio, 2′-O-trifluoromethyl, 2′-O-ethyl-trifluoromethoxy, or 2′-O-difluoromethoxy-ethoxy purine nucleotides or alternately a plurality of purine nucleotides are 2′-O-methyl, 4′-thio, 2′-O-trifluoromethyl, 2′-O-ethyl-trifluoromethoxy, or 2′-O-difluoromethoxy-ethoxy purine nucleotides) and one or more purine nucleotides present in the antisense region are 2′-O-methyl, 4′-thio, 2′-O-trifluoromethyl, 2′-O-ethyl-trifluoromethoxy, or 2′-O-difluoromethoxy-ethoxy purine nucleotides (e.g., wherein all purine nucleotides are 2′-O-methyl, 4′-thio, 2′-O-trifluoromethyl, 2′-O-ethyl-trifluoromethoxy, or 2′-O-difluoromethoxy-ethoxy purine nucleotides or alternately a plurality of purine nucleotides are 2′-O-methyl, 4′-thio, 2′-O-trifluoromethyl, 2′-O-ethyl-trifluoromethoxy, or 2′-O-difluoromethoxy-ethoxy purine nucleotides). Also, in any of these embodiments, one or more purine nucleotides present in the sense region are alternatively purine ribonucleotides (e.g., wherein all purine nucleotides are purine ribonucleotides or alternately a plurality of purine nucleotides are purine ribonucleotides) and any purine nucleotides present in the antisense region are 2′-O-methyl, 4′-thio, 2′-O-trifluoromethyl, 2′-O-ethyl-trifluoromethoxy, or 2′-O-difluoromethoxy-ethoxy purine nucleotides (e.g., wherein all purine nucleotides are 2′-O-methyl, 4′-thio, 2′-O-trifluoromethyl, 2′-O-ethyl-trifluoromethoxy, or 2′-O-difluoromethoxy-ethoxy purine nucleotides or alternately a plurality of purine nucleotides are 2′-O-methyl, 4′-thio, 2′-O-trifluoromethyl, 2′-O-ethyl-trifluoromethoxy, or 2′-O-difluoromethoxy-ethoxy purine nucleotides). Additionally, in any of these embodiments, one or more purine nucleotides present in the sense region and/or present in the antisense region are alternatively selected from the group consisting of 2′-deoxy nucleotides, locked nucleic acid (LNA) nucleotides, 2′-methoxyethyl nucleotides, 4′-thionucleotides, 2′-O-trifluoromethyl nucleotides, 2′-O-ethyl-trifluoromethoxy nucleotides, 2′-O-difluoromethoxy-ethoxy nucleotides and 2′-O-methyl nucleotides (e.g., wherein all purine nucleotides are selected from the group consisting of 2′-deoxy nucleotides, locked nucleic acid (LNA) nucleotides, 2′-methoxyethyl nucleotides, 4′-thionucleotides, 2′-O-trifluoromethyl nucleotides, 2′-O-ethyl-trifluoromethoxy nucleotides, 2′-O-difluoromethoxy-ethoxy nucleotides and 2′-O-methyl nucleotides or alternately a plurality of purine nucleotides are selected from the group consisting of 2′-deoxy nucleotides, locked nucleic acid (LNA) nucleotides, 2′-methoxyethyl nucleotides, 4′-thionucleotides, 2′-O-trifluoromethyl nucleotides, 2′-O-ethyl-trifluoromethoxy nucleotides, 2′-O-difluoromethoxy-ethoxy nucleotides and 2′-O-methyl nucleotides).

[0119] In another embodiment, any modified nucleotides present in the siNA molecules of the invention, preferably in the antisense strand of the siNA molecules of the invention, but also optionally in the sense and/or both antisense and sense strands, comprise modified nucleotides having properties or characteristics similar to naturally occurring ribonucleotides. For example, the invention features siNA molecules including modified nucleotides having a Northern conformation (e.g., Northern pseudorotation cycle, see for example Saenger, Principles of Nucleic Acid Structure, Springer-Verlag ed., 1984). Such nucleotides having a Northern conformation are generally considered to be “ribo-like” as they have a C3′-endo sugar pucker conformation. As such, chemically modified nucleotides present in the siNA molecules of the invention, preferably in the antisense strand of the siNA molecules of the invention, but also optionally in the sense and/or both antisense and sense strands, are resistant to nuclease degradation while at the same time maintaining the capacity to mediate RNAi. Non-limiting examples of nucleotides having a northern configuration include locked nucleic acid (LNA) nucleotides (e.g., 2′-O, 4′-C-methylene-(D-ribofuranosyl) nucleotides); 2′-methoxyethoxy (MOE) nucleotides; 2′-methyl-thio-ethyl, 2′-deoxy-2′-fluoro nucleotides, 2′-deoxy-2′-chloro nucleotides, 2′-azido nucleotides, 2′-O-trifluoromethyl nucleotides, 2′-O-ethyl-trifluoromethoxy nucleotides, 2′-O-difluoromethoxy-ethoxy nucleotides, 4′-thio nucleotides and 2′-O-methyl nucleotides.

[0120] In one embodiment, the sense strand of a double stranded siNA molecule of the invention comprises a terminal cap moiety, (see for example FIG. 10) such as an inverted deoxyabaisc moiety, at the 3′-end, 5′-end, or both 3′ and 5′-ends of the sense strand.

[0121] In one embodiment, the invention features a chemically-modified short interfering nucleic acid molecule (siNA) capable of mediating RNA interference (RNAi) inside a cell or reconstituted in vitro system, wherein the chemical modification comprises a conjugate covalently attached to the chemically-modified siNA molecule. Non-limiting examples of conjugates contemplated by the invention include conjugates and ligands described in Vargeese et al., U.S. Ser. No. 10/427,160, filed Apr. 30, 2003, incorporated by reference herein in its entirety, including the drawings. In another embodiment, the conjugate is covalently attached to the chemically-modified siNA molecule via a biodegradable linker. In one embodiment, the conjugate molecule is attached at the 3′-end of either the sense strand, the antisense strand, or both strands of the chemically-modified siNA molecule. In another embodiment, the conjugate molecule is attached at the 5′-end of either the sense strand, the antisense strand, or both strands of the chemically-modified siNA molecule. In yet another embodiment, the conjugate molecule is attached both the 3′-end and 5′-end of either the sense strand, the antisense strand, or both strands of the chemically-modified siNA molecule, or any combination thereof. In one embodiment, a conjugate molecule of the invention comprises a molecule that facilitates delivery of a chemically-modified siNA molecule into a biological system, such as a cell. In another embodiment, the conjugate molecule attached to the chemically-modified siNA molecule is a ligand for a cellular receptor, such as peptides derived from naturally occurring protein ligands; protein localization sequences, including cellular ZIP code sequences; antibodies; nucleic acid aptamers; vitamins and other co-factors, such as folate and N-acetylgalactosamine; polymers, such as polyethyleneglycol (PEG); phospholipids; cholesterol; steroids, and polyamines, such as PEI, spermine or spermidine. Examples of specific conjugate molecules contemplated by the instant invention that can be attached to chemically-modified siNA molecules are described in Vargeese et al., U.S. Ser. No. 10/201,394, filed Jul. 22, 2002 incorporated by reference herein. The type of conjugates used and the extent of conjugation of siNA molecules of the invention can be evaluated for improved pharmacokinetic profiles, bioavailability, and/or stability of siNA constructs while at the same time maintaining the ability of the siNA to mediate RNAi activity. As such, one skilled in the art can screen siNA constructs that are modified with various conjugates to determine whether the siNA conjugate complex possesses improved properties while maintaining the ability to mediate RNAi, for example in animal models as are generally known in the art.

[0122] In one embodiment, the invention features a short interfering nucleic acid (siNA) molecule of the invention, wherein the siNA further comprises a nucleotide, non-nucleotide, or mixed nucleotide/non-nucleotide linker that joins the sense region of the siNA to the antisense region of the siNA. In one embodiment, a nucleotide, non-nucleotide, or mixed nucleotide/non-nucleotide linker is used, for example, to attach a conjugate moiety to the siNA. In one embodiment, a nucleotide linker of the invention can be a linker of >2 nucleotides in length, for example about 3, 4, 5, 6, 7, 8, 9, or 10 nucleotides in length. In another embodiment, the nucleotide linker can be a nucleic acid aptamer. By “aptamer” or “nucleic acid aptamer” as used herein is meant a nucleic acid molecule that binds specifically to a target molecule wherein the nucleic acid molecule has sequence that comprises a sequence recognized by the target molecule in its natural setting. Alternately, an aptamer can be a nucleic acid molecule that binds to a target molecule where the target molecule does not naturally bind to a nucleic acid. The target molecule can be any molecule of interest. For example, the aptamer can be used to bind to a ligand-binding domain of a protein, thereby preventing interaction of the naturally occurring ligand with the protein. This is a non-limiting example and those in the art will recognize that other embodiments can be readily generated using techniques generally known in the art. (See, for example, Gold et al., 1995, Annu. Rev. Biochem., 64, 763; Brody and Gold, 2000, J. Biotechnol., 74, 5; Sun, 2000, Curr. Opin. Mol. Ther., 2, 100; Kusser, 2000, J. Biotechnol., 74, 27; Hermann and Patel, 2000, Science, 287, 820; and Jayasena, 1999, Clinical Chemistry, 45, 1628.)

[0123] In yet another embodiment, a non-nucleotide linker of the invention comprises abasic nucleotide, polyether, polyamine, polyamide, peptide, carbohydrate, lipid, polyhydrocarbon, or other polymeric compounds (e.g. polyethylene glycols such as those having between 2 and 100 ethylene glycol units). Specific examples include those described by Seela and Kaiser, Nucleic Acids Res. 1990, 18:6353 and Nucleic Acids Res. 1987, 15:3113; Cload and Schepartz, J. Am. Chem. Soc. 1991, 113:6324; Richardson and Schepartz, J. Am. Chem. Soc. 1991, 113:5109; Ma et al., Nucleic Acids Res. 1993, 21:2585 and Biochemistry 1993, 32:1751; Durand et al., Nucleic Acids Res. 1990, 18:6353; McCurdy et al., Nucleosides & Nucleotides 1991, 10:287; Jschke et al., Tetrahedron Lett. 1993, 34:301; Ono et al., Biochemistry 1991, 30:9914; Arnold et al., International Publication No. WO 89/02439; Usman et al., International Publication No. WO 95/06731; Dudycz et al., International Publication No. WO 95/11910 and Ferentz and Verdine, J. Am. Chem. Soc. 1991, 113:4000, all hereby incorporated by reference herein. A “non-nucleotide” further means any group or compound that can be incorporated into a nucleic acid chain in the place of one or more nucleotide units, including either sugar and/or phosphate substitutions, and allows the remaining bases to exhibit their enzymatic activity. The group or compound can be abasic in that it does not contain a commonly recognized nucleotide base, such as adenosine, guanine, cytosine, uracil or thymine, for example at the C1 position of the sugar.

[0124] In one embodiment, the invention features a short interfering nucleic acid (siNA) molecule capable of mediating RNA interference (RNAi) inside a cell or reconstituted in vitro system, wherein one or both strands of the siNA molecule that are assembled from two separate oligonucleotides do not comprise any ribonucleotides. For example, a siNA molecule can be assembled from a single oligonculeotide where the sense and antisense regions of the siNA comprise separate oligonucleotides that do not have any ribonucleotides (e.g., nucleotides having a 2′-OH group) present in the oligonucleotides. In another example, a siNA molecule can be assembled from a single oligonculeotide where the sense and antisense regions of the siNA are linked or circularized by a nucleotide or non-nucleotide linker as described herein, wherein the oligonucleotide does not have any ribonucleotides (e.g., nucleotides having a 2′-OH group) present in the oligonucleotide. Applicant has surprisingly found that the presense of ribonucleotides (e.g., nucleotides having a 2′-hydroxyl group) within the siNA molecule is not required or essential to support RNAi activity. As such, in one embodiment, all positions within the siNA can include chemically modified nucleotides and/or non-nucleotides such as nucleotides and or non-nucleotides having Formula I, II, III, IV, V, VI, or VII or any combination thereof to the extent that the ability of the siNA molecule to support RNAi activity in a cell is maintained.

[0125] In one embodiment, a siNA molecule of the invention is a single stranded siNA molecule that mediates RNAi activity in a cell or reconstituted in vitro system comprising a single stranded polynucleotide having complementarity to a target HDAC nucleic acid sequence. In another embodiment, the single stranded siNA molecule of the invention comprises a 5′-terminal phosphate group. In another embodiment, the single stranded siNA molecule of the invention comprises a 5′-terminal phosphate group and a 3′-terminal phosphate group (e.g., a 2′,3′-cyclic phosphate). In another embodiment, the single stranded siNA molecule of the invention comprises about 15 to about 30 (e.g., about 15, 16, 17, 18, 19, 20, 21, 22, 23, 24, 25, 26, 27, 28, 29, or 30) nucleotides. In yet another embodiment, the single stranded siNA molecule of the invention comprises one or more chemically modified nucleotides or non-nucleotides described herein. For example, all the positions within the siNA molecule can include chemically-modified nucleotides such as nucleotides having any of Formulae I-VII, or any combination thereof to the extent that the ability of the siNA molecule to support RNAi activity in a cell is maintained.

[0126] In one embodiment, a siNA molecule of the invention is a single stranded siNA molecule that mediates RNAi activity in a cell or reconstituted in vitro system comprising a single stranded polynucleotide having complementarity to a target HDAC nucleic acid sequence, wherein one or more pyrimidine nucleotides present in the siNA are 2′-deoxy-2′-fluoro, 4′-thio, 2′-O-trifluoromethyl, 2′-O-ethyl-trifluoromethoxy, or 2′-O-difluoromethoxy-ethoxy pyrimidine nucleotides (e.g., wherein all pyrimidine nucleotides are 2′-deoxy-2′-fluoro, 4′-thio, 2′-O-trifluoromethyl, 2′-O-ethyl-trifluoromethoxy, or 2′-O-difluoromethoxy-ethoxy pyrimidine nucleotides or alternately a plurality of pyrimidine nucleotides are 2′-deoxy-2′-fluoro, 4′-thio, 2′-O-trifluoromethyl, 2′-O-ethyl-trifluoromethoxy, or 2′-O-difluoromethoxy-ethoxy pyrimidine nucleotides), and wherein any purine nucleotides present in the antisense region are 2′-O-methyl, 4′-thio, 2′-O-trifluoromethyl, 2′-O-ethyl-trifluoromethoxy, or 2′-O-difluoromethoxy-ethoxy purine nucleotides (e.g., wherein all purine nucleotides are 2′-O-methyl, 4′-thio, 2′-O-trifluoromethyl, 2′-O-ethyl-trifluoromethoxy, or 2′-O-difluoromethoxy-ethoxy purine nucleotides or alternately a plurality of purine nucleotides are 2′-O-methyl, 4′-thio, 2′-O-trifluoromethyl, 2′-O-ethyl-trifluoromethoxy, or 2′-O-difluoromethoxy-ethoxy purine nucleotides), and a terminal cap modification, such as any modification described herein or shown in FIG. 10, that is optionally present at the 3′-end, the 5′-end, or both of the 3′ and 5′-ends of the antisense sequence. The siNA optionally further comprises about 1 to about 4 or more (e.g., about 1, 2, 3, 4 or more) terminal 2′-deoxynucleotides at the 3′-end of the siNA molecule, wherein the terminal nucleotides can further comprise one or more (e.g., 1, 2, 3, 4 or more) phosphorothioate, phosphonoacetate, and/or thiophosphonoacetate internucleotide linkages, and wherein the siNA optionally further comprises a terminal phosphate group, such as a 5′-terminal phosphate group. In any of these embodiments, any purine nucleotides present in the antisense region are alternatively 2′-deoxy purine nucleotides (e.g., wherein all purine nucleotides are 2′-deoxy purine nucleotides or alternately a plurality of purine nucleotides are 2′-deoxy purine nucleotides). Also, in any of these embodiments, any purine nucleotides present in the siNA (i.e., purine nucleotides present in the sense and/or antisense region) can alternatively be locked nucleic acid (LNA) nucleotides (e.g., wherein all purine nucleotides are LNA nucleotides or alternately a plurality of purine nucleotides are LNA nucleotides). Also, in any of these embodiments, any purine nucleotides present in the siNA are alternatively 2′-methoxyethyl purine nucleotides (e.g., wherein all purine nucleotides are 2′-methoxyethyl purine nucleotides or alternately a plurality of purine nucleotides are 2′-methoxyethyl purine nucleotides). In another embodiment, any modified nucleotides present in the single stranded siNA molecules of the invention comprise modified nucleotides having properties or characteristics similar to naturally occurring ribonucleotides. For example, the invention features siNA molecules including modified nucleotides having a Northern conformation (e.g., Northern pseudorotation cycle, see for example Saenger, Principles of Nucleic Acid Structure, Springer-Verlag ed., 1984). As such, chemically modified nucleotides present in the single stranded siNA molecules of the invention are preferably resistant to nuclease degradation while at the same time maintaining the capacity to mediate RNAi.

[0127] In one embodiment, a siNA molecule of the invention comprises chemically modified nucleotides or non-nucleotides (e.g., having any modification described herein, including any of Formulae I-VII, such as 2′-deoxy, 2′-deoxy-2′-fluoro, 4′-thio, 2′-O-trifluoromethyl, 2′-O-ethyl-trifluoromethoxy, 2′-O-difluoromethoxy-ethoxy or 2′-O-methyl nucleotides) at alternating positions within one or more strands or regions of the siNA molecule. For example, such chemical modifications can be introduced at every other position of a RNA based siNA molecule, starting at either the first or second nucleotide from the 3′-end or 5′-end of the siNA. In a non-limiting example, a double stranded siNA molecule of the invention in which each strand of the siNA is 21 nucleotides in length is featured wherein positions 1, 3, 5, 7, 9, 11, 13, 15, 17, 19 and 21 of each strand are chemically modified (e.g., with compounds having any of Formulae I-VII, such as such as 2′-deoxy, 2′-deoxy-2′-fluoro, 4′-thio, 2′-O-trifluoromethyl, 2′-O-ethyl-trifluoromethoxy, 2′-O-difluoromethoxy-ethoxy or 2′-O-methyl nucleotides). In another non-limiting example, a double stranded siNA molecule of the invention in which each strand of the siNA is 21 nucleotides in length is featured wherein positions 2, 4, 6, 8, 10, 12, 14, 16, 18, and 20 of each strand are chemically modified (e.g., with compounds having any of Formulae I-VII, such as such as 2′-deoxy, 2′-deoxy-2′-fluoro, 4′-thio, 2′-O-trifluoromethyl, 2′-O-ethyl-trifluoromethoxy, 2′-O-difluoromethoxy-ethoxy or 2′-O-methyl nucleotides). In one embodiment, one strand of the double stranded siNA molecule comprises chemical modifications at positions 2, 4, 6, 8, 10, 12, 14, 16, 18, and 20 and chemical modifications at positions 1, 3, 5, 7, 9, 11, 13, 15, 17, 19 and 21. Such siNA molecules can further comprise terminal cap moieties and/or backbone modifications as described herein.

[0128] In one embodiment, the invention features a method for modulating the expression of a target HDAC gene within a cell comprising: (a) synthesizing a siNA molecule of the invention, which can be chemically-modified or unmodified, wherein one of the siNA strands comprises a sequence complementary to RNA of the target HDAC gene; and (b) introducing the siNA molecule into a cell under conditions suitable to modulate (e.g., inhibit) the expression of the target HDAC gene in the cell.

[0129] In one embodiment, the invention features a method for modulating the expression of a target HDAC gene within a cell comprising: (a) synthesizing a siNA molecule of the invention, which can be chemically-modified or unmodified, wherein one of the siNA strands comprises a sequence complementary to RNA of the target HDAC gene and wherein the sense strand sequence of the siNA comprises a sequence identical or substantially similar to the sequence of the target HDAC RNA; and (b) introducing the siNA molecule into a cell under conditions suitable to modulate (e.g., inhibit) the expression of the target HDAC gene in the cell.

[0130] In another embodiment, the invention features a method for modulating the expression of more than one target HDAC gene within a cell comprising: (a) synthesizing siNA molecules of the invention, which can be chemically-modified or unmodified, wherein one of the siNA strands comprises a sequence complementary to RNA of the target HDAC genes; and (b) introducing the siNA molecules into a cell under conditions suitable to modulate (e.g., inhibit) the expression of the target HDAC genes in the cell.

[0131] In another embodiment, the invention features a method for modulating the expression of two or more target HDAC genes within a cell comprising: (a) synthesizing one or more siNA molecules of the invention, which can be chemically-modified or unmodified, wherein the siNA strands comprise sequences complementary to RNA of the target HDAC genes and wherein the sense strand sequences of the siNAs comprise sequences identical or substantially similar to the sequences of the target HDAC RNAs; and (b) introducing the siNA molecules into a cell under conditions suitable to modulate (e.g., inhibit) the expression of the target HDAC genes in the cell.

[0132] In another embodiment, the invention features a method for modulating the expression of more than one target HDAC gene within a cell comprising: (a) synthesizing a siNA molecule of the invention, which can be chemically-modified or unmodified, wherein one of the siNA strands comprises a sequence complementary to RNA of the target HDAC gene and wherein the sense strand sequence of the siNA comprises a sequence identical or substantially similar to the sequences of the target HDAC RNAs; and (b) introducing the siNA molecule into a cell under conditions suitable to modulate (e.g., inhibit) the expression of the target HDAC genes in the cell.

[0133] In another embodiment, the invention features a method for modulating the expression of a target HDAC gene within a cell comprising: (a) synthesizing a siNA molecule of the invention, which can be chemically-modified or unmodified, wherein one of the siNA strands comprises a sequence complementary to RNA of the target HDAC gene, wherein the sense strand sequence of the siNA comprises a sequence identical or substantially similar to the sequences of the target HDAC RNA; and (b) introducing the siNA molecule into a cell under conditions suitable to modulate (e.g., inhibit) the expression of the target HDAC gene in the cell.

[0134] In one embodiment, siNA molecules of the invention are used as reagents in ex vivo applications. For example, siNA reagents are introduced into tissue or cells that are transplanted into a subject for therapeutic effect. The cells and/or tissue can be derived from an organism or subject that later receives the explant, or can be derived from another organism or subject prior to transplantation. The siNA molecules can be used to modulate the expression of one or more genes in the cells or tissue, such that the cells or tissue obtain a desired phenotype or are able to perform a function when transplanted in vivo. In one embodiment, certain target HDAC cells from a patient are extracted. These extracted cells are contacted with siNAs target HDACing a specific nucleotide sequence within the cells under conditions suitable for uptake of the siNAs by these cells (e.g. using delivery reagents such as cationic lipids, liposomes and the like or using techniques such as electroporation to facilitate the delivery of siNAs into cells). The cells are then reintroduced back into the same patient or other patients.

[0135] In one embodiment, the invention features a method of modulating the expression of a target HDAC gene in a tissue explant comprising: (a) synthesizing a siNA molecule of the invention, which can be chemically-modified, wherein one of the siNA strands comprises a sequence complementary to RNA of the target HDAC gene; and (b) introducing the siNA molecule into a cell of the tissue explant derived from a particular organism under conditions suitable to modulate (e.g., inhibit) the expression of the target HDAC gene in the tissue explant. In another embodiment, the method further comprises introducing the tissue explant back into the organism the tissue was derived from or into another organism under conditions suitable to modulate (e.g., inhibit) the expression of the target HDAC gene in that organism.

[0136] In one embodiment, the invention features a method of modulating the expression of a target HDAC gene in a tissue explant comprising: (a) synthesizing a siNA molecule of the invention, which can be chemically-modified, wherein one of the siNA strands comprises a sequence complementary to RNA of the target HDAC gene and wherein the sense strand sequence of the siNA comprises a sequence identical or substantially similar to the sequence of the target HDAC RNA; and (b) introducing the siNA molecule into a cell of the tissue explant derived from a particular organism under conditions suitable to modulate (e.g., inhibit) the expression of the target HDAC gene in the tissue explant. In another embodiment, the method further comprises introducing the tissue explant back into the organism the tissue was derived from or into another organism under conditions suitable to modulate (e.g., inhibit) the expression of the target HDAC gene in that organism.

[0137] In another embodiment, the invention features a method of modulating the expression of more than one target HDAC gene in a tissue explant comprising: (a) synthesizing siNA molecules of the invention, which can be chemically-modified, wherein one of the siNA strands comprises a sequence complementary to RNA of the target HDAC genes; and (b) introducing the siNA molecules into a cell of the tissue explant derived from a particular organism under conditions suitable to modulate (e.g., inhibit) the expression of the target HDAC genes in the tissue explant. In another embodiment, the method further comprises introducing the tissue explant back into the organism the tissue was derived from or into another organism under conditions suitable to modulate (e.g., inhibit) the expression of the target HDAC genes in that organism.

[0138] In one embodiment, the invention features a method of modulating the expression of a target HDAC gene in a subject or organism comprising: (a) synthesizing a siNA molecule of the invention, which can be chemically-modified, wherein one of the siNA strands comprises a sequence complementary to RNA of the target HDAC gene; and (b) introducing the siNA molecule into the subject or organism under conditions suitable to modulate (e.g., inhibit) the expression of the target HDAC gene in the subject or organism. The level of target HDAC protein or RNA can be determined using various methods well-known in the art.

[0139] In another embodiment, the invention features a method of modulating the expression of more than one target HDAC gene in a subject or organism comprising: (a) synthesizing siNA molecules of the invention, which can be chemically-modified, wherein one of the siNA strands comprises a sequence complementary to RNA of the target HDAC genes; and (b) introducing the siNA molecules into the subject or organism under conditions suitable to modulate (e.g., inhibit) the expression of the target HDAC genes in the subject or organism. The level of target HDAC protein or RNA can be determined as is known in the art.

[0140] In one embodiment, the invention features a method for modulating the expression of a target HDAC gene within a cell comprising: (a) synthesizing a siNA molecule of the invention, which can be chemically-modified, wherein the siNA comprises a single stranded sequence having complementarity to RNA of the target HDAC gene; and (b) introducing the siNA molecule into a cell under conditions suitable to modulate (e.g., inhibit) the expression of the target HDAC gene in the cell.

[0141] In another embodiment, the invention features a method for modulating the expression of more than one target HDAC gene within a cell comprising: (a) synthesizing siNA molecules of the invention, which can be chemically-modified, wherein the siNA comprises a single stranded sequence having complementarity to RNA of the target HDAC gene; and (b) contacting the cell in vitro or in vivo with the siNA molecule under conditions suitable to modulate (e.g., inhibit) the expression of the target HDAC genes in the cell.

[0142] In one embodiment, the invention features a method of modulating the expression of a target HDAC gene in a tissue explant (e.g., a cochlea, skin, heart, liver, spleen, cornea, lung, stomach, kidney, vein, artery, hair, appendage, or limb transplant, or any other organ, tissue or cell as can be transplanted from one organism to another or back to the same organism from which the organ, tissue or cell is derived) comprising: (a) synthesizing a siNA molecule of the invention, which can be chemically-modified, wherein the siNA comprises a single stranded sequence having complementarity to RNA of the target HDAC gene; and (b) contacting a cell of the tissue explant derived from a particular subject or organism with the siNA molecule under conditions suitable to modulate (e.g., inhibit) the expression of the target HDAC gene in the tissue explant. In another embodiment, the method further comprises introducing the tissue explant back into the subject or organism the tissue was derived from or into another subject or organism under conditions suitable to modulate (e.g., inhibit) the expression of the target HDAC gene in that subject or organism.

[0143] In another embodiment, the invention features a method of modulating the expression of more than one target HDAC gene in a tissue explant (e.g., a cochlear, skin, heart, liver, spleen, cornea, lung, stomach, kidney, vein, artery, hair, appendage, or limb transplant, or any other organ, tissue or cell as can be transplanted from one organism to another or back to the same organism from which the organ, tissue or cell is derived) comprising: (a) synthesizing siNA molecules of the invention, which can be chemically-modified, wherein the siNA comprises a single stranded sequence having complementarity to RNA of the target HDAC gene; and (b) introducing the siNA molecules into a cell of the tissue explant derived from a particular subject or organism under conditions suitable to modulate (e.g., inhibit) the expression of the target HDAC genes in the tissue explant. In another embodiment, the method further comprises introducing the tissue explant back into the subject or organism the tissue was derived from or into another subject or organism under conditions suitable to modulate (e.g., inhibit) the expression of the target HDAC genes in that subject or organism.

[0144] In one embodiment, the invention features a method of modulating the expression of a target HDAC gene in a subject or organism comprising: (a) synthesizing a siNA molecule of the invention, which can be chemically-modified, wherein the siNA comprises a single stranded sequence having complementarity to RNA of the target HDAC gene; and (b) introducing the siNA molecule into the subject or organism under conditions suitable to modulate (e.g., inhibit) the expression of the target HDAC gene in the subject or organism.

[0145] In another embodiment, the invention features a method of modulating the expression of more than one target HDAC gene in a subject or organism comprising: (a) synthesizing siNA molecules of the invention, which can be chemically-modified, wherein the siNA comprises a single stranded sequence having complementarity to RNA of the target HDAC gene; and (b) introducing the siNA molecules into the subject or organism under conditions suitable to modulate (e.g., inhibit) the expression of the target HDAC genes in the subject or organism.

[0146] In one embodiment, the invention features a method of modulating the expression of a target HDAC gene in a subject or organism comprising contacting the subject or organism with a siNA molecule of the invention under conditions suitable to modulate (e.g., inhibit) the expression of the target HDAC gene in the subject or organism.

[0147] In one embodiment, the invention features a method for treating or preventing a disease, disorder, trait or condition related to gene expression in a subject or organism comprising contacting the subject or organism with a siNA molecule of the invention under conditions suitable to modulate the expression of the target HDAC gene in the subject or organism. The reduction of gene expression and thus reduction in the level of the respective protein/RNA relieves, to some extent, the symptoms of the disease, disorder, trait or condition.

[0148] In one embodiment, the invention features a method for treating or preventing cancer in a subject or organism comprising contacting the subject or organism with a siNA molecule of the invention under conditions suitable to modulate the expression of the target HDAC gene in the subject or organism whereby the treatment or prevention of cancer can be achieved. In one embodiment, the invention features contacting the subject or organism with a siNA molecule of the invention via local administration to relevant tissues or cells, such as cancerous cells and tissues. In one embodiment, the invention features contacting the subject or organism with a siNA molecule of the invention via systemic administration (such as via intravenous or subcutaneous administration of siNA) to relevant tissues or cells, such as tissues or cells involved in the maintenance or development of cancer in a subject or organism. The siNA molecule of the invention can be formulated or conjugated as described herein or otherwise known in the art to target HDAC appropriate tisssues or cells in the subject or organism. The siNA molecule can be combined with other therapeutic treatments and modalities as are known in the art for the treatment of or prevention of cancer in a subject or organism.

[0149] In one embodiment, the invention features a method for treating or preventing a proliferative disease or condition in a subject or organism comprising contacting the subject or organism with a siNA molecule of the invention under conditions suitable to modulate the expression of the target HDAC gene in the subject or organism whereby the treatment or prevention of the proliferative disease or condition can be achieved. In one embodiment, the invention features contacting the subject or organism with a siNA molecule of the invention via local administration to relevant tissues or cells, such as cells and tissues involved in proliferative disease. In one embodiment, the invention features contacting the subject or organism with a siNA molecule of the invention via systemic administration (such as via intravenous or subcutaneous administration of siNA) to relevant tissues or cells, such as tissues or cells involved in the maintenance or development of the proliferative disease or condition in a subject or organism. The siNA molecule of the invention can be formulated or conjugated as described herein or otherwise known in the art to target HDAC appropriate tisssues or cells in the subject or organism. The siNA molecule can be combined with other therapeutic treatments and modalities as are known in the art for the treatment of or prevention of proliferative diseases, traits, disorders, or conditions in a subject or organism.

[0150] In one embodiment, the invention features a method for treating or preventing an age-related disease, disorder, trait or condition in a subject or organism comprising contacting the subject or organism with a siNA molecule of the invention under conditions suitable to modulate the expression of the target HDAC gene in the subject or organism whereby the treatment or prevention of the age-related disease, disorder, trait or condition can be achieved. In one embodiment, the invention features contacting the subject or organism with a siNA molecule of the invention via local administration to relevant tissues or cells, such as cells and tissues involved in the age-related disease, disorder, trait or condition. In one embodiment, the invention features contacting the subject or organism with a siNA molecule of the invention via systemic administration (such as via intravenous or subcutaneous administration of siNA) to relevant tissues or cells, such as tissues or cells involved in the maintenance or development of the age-related disease, disorder, trait or condition in a subject or organism. The siNA molecule of the invention can be formulated or conjugated as described herein or otherwise known in the art to target HDAC appropriate tisssues or cells in the subject or organism. The siNA molecule can be combined with other therapeutic treatments and modalities as are known in the art for the treatment of or prevention of age-related diseases, traits, disorders, or conditions in a subject or organism.

[0151] In one embodiment, the invention features a method for treating or preventing transplant and/or tissue rejection (allograft rejection) in a subject or organism comprising contacting the subject or organism with a siNA molecule of the invention under conditions suitable to modulate the expression of the target HDAC gene in the subject or organism whereby the treatment or prevention of transplant and/or tissue rejection (allograft rejection) can be achieved. In one embodiment, the invention features contacting the subject or organism with a siNA molecule of the invention via local administration to relevant tissues or cells, such as cells and tissues involved in transplant and/or tissue rejection (allograft rejection). In one embodiment, the invention features contacting the subject or organism with a siNA molecule of the invention via systemic administration (such as via intravenous or subcutaneous administration of siNA) to relevant tissues or cells, such as tissues or cells involved in the maintenance or development of transplant and/or tissue rejection (allograft rejection) in a subject or organism. The siNA molecule of the invention can be formulated or conjugated as described herein or otherwise known in the art to target HDAC appropriate tisssues or cells in the subject or organism. The siNA molecule can be combined with other therapeutic treatments and modalities as are known in the art for the treatment of or prevention of transplant and/or tissue rejection (allograft rejection) in a subject or organism.

[0152] In one embodiment, the siNA molecule or double stranded nucleic acid molecule of the invention is formulated as a composition described in U.S. Provisional patent application No. 60/678,531 and in related U.S. Provisional patent application No. 60/703,946, both of which are incorporated by reference herein in their entirety.

[0153] In one embodiment, the invention features a method for treating or preventing cancer or proliferative disease in a subject, comprising administering to the subject a chemically synthesized double stranded nucleic acid molecule, wherein (a) the double stranded nucleic acid molecule comprises a sense strand and an antisense strand; (b) each strand of the double stranded nucleic acid molecule is 15 to 30 nucleotides in length; (c) at least 15 nucleotides of the sense strand are complementary to the antisense strand; and (d) the antisense strand of the double stranded nucleic acid molecule has complementarity to a HDAC target RNA, wherein the double stranded nucleic acid molecule is administered under conditions suitable for reducing or inhibiting the level of cancer or proliferative disease in the subject compared to a subject not treated with the double stranded nucleic acid molecule.

[0154] In one embodiment, the invention features a method for treating or preventing cancer or proliferative disease in a subject, comprising administering to the subject a chemically synthesized double stranded nucleic acid molecule, wherein (a) the double stranded nucleic acid molecule comprises a sense strand and an antisense strand; (b) each strand of the double stranded nucleic acid molecule is 15 to 30 nucleotides in length; (c) at least 15 nucleotides of the sense strand are complementary to the antisense strand; (d) the antisense strand of the double stranded nucleic acid molecule has complementarity to a HDAC target RNA; (e) at least 20% of the internal nucleotides of each strand of the double stranded nucleic acid molecule comprises nucleosides having a chemical modification; and (f) at least two (e.g., 2, 3, 4, 5, or more) of the chemical modifications are different from each other, wherein the double stranded nucleic acid molecule is administered under conditions suitable for reducing or inhibiting the level of cancer or proliferative disease in the subject compared to a subject not treated with the double stranded nucleic acid molecule.

[0155] In one embodiment, the invention features a method for treating or preventing cancer or proliferative disease in a subject, comprising administering to the subject a chemically synthesized double stranded nucleic acid molecule, wherein (a) the double stranded nucleic acid molecule comprises a sense strand and an antisense strand; (b) each strand of the double stranded nucleic acid molecule is 15 to 30 nucleotides in length; (c) at least 15 nucleotides of the sense strand are complementary to the antisense strand; (d) the antisense strand of the double stranded nucleic acid molecule has complementarity to a HDAC target RNA; (e) at least 20% of the internal nucleotides of each strand of the double stranded nucleic acid molecule comprises nucleosides having a sugar modification; and (f) at least two (e.g., 2, 3, 4, 5, or more) of the sugar modifications are different from each other, wherein the double stranded nucleic acid molecule is administered under conditions suitable for reducing or inhibiting the level of cancer or proliferative disease in the subject compared to a subject not treated with the double stranded nucleic acid molecule.

[0156] In any of the methods of treatment of the invention, the siNA can be administered to the subject as a course of treatment, for example administration at various time intervals, such as once per day over the course of treatment, once every two days over the course of treatment, once every three days over the course of treatment, once every four days over the course of treatment, once every five days over the course of treatment, once every six days over the course of treatment, once per week over the course of treatment, once every other week over the course of treatment, once per month over the course of treatment, etc. In one embodiment, the course of treatment is from about one to about 52 weeks or longer (e.g., indefinitely). In one embodiment, the course of treatment is from about one to about 48 months or longer (e.g., indefinitely).

[0157] In any of the methods of treatment of the invention, the siNA can be administered to the subject systemically as described herein or otherwise known in the art, either alone as a monotherapy or in combination with additional therapies as are known in the art. Systemic administration can include, for example, intravenous, subcutaneous, intramuscular, catheterization, nasopharangeal, transdermal, or gastrointestinal administration as is generally known in the art.

[0158] In one embodiment, in any of the methods of treatment or prevention of the invention, the siNA can be administered to the subject locally or to local tissues as described herein or otherwise known in the art, either alone as a monotherapy or in combination with additional therapies as are known in the art. Local administration can include, for example, catheterization, implantation, direct injection, dermal/transdermal application, stenting, ear/eye drops, or portal vein administration to relevant tissues, or any other local administration technique, method or procedure, as is generally known in the art.

[0159] In another embodiment, the invention features a method of modulating the expression of more than one target HDAC gene in a subject or organism comprising contacting the subject or organism with one or more siNA molecules of the invention under conditions suitable to modulate (e.g., inhibit) the expression of the target HDAC genes in the subject or organism.

[0160] The siNA molecules of the invention can be designed to down regulate or inhibit target gene expression through RNAi targeting of a variety of nucleic acid molecules. In one embodiment, the siNA molecules of the invention are used to target various DNA corresponding to a target HDAC gene, for example via heterochromatic silencing. In one embodiment, the siNA molecules of the invention are used to target various RNAs corresponding to a target HDAC gene, for example via RNA target cleavage or translational inhibition. Non-limiting examples of such RNAs include messenger RNA (mRNA), non-coding RNA or regulatory elements, alternate RNA splice variants of target gene(s), post-transcriptionally modified RNA of target gene(s), pre-mRNA of target gene(s), and/or RNA templates. If alternate splicing produces a family of transcripts that are distinguished by usage of appropriate exons, the instant invention can be used to inhibit gene expression through the appropriate exons to specifically inhibit or to distinguish among the functions of HDAC gene family members. For example, a protein that contains an alternatively spliced transmembrane domain can be expressed in both membrane bound and secreted forms. Use of the invention to target the exon containing the transmembrane domain can be used to determine the functional consequences of pharmaceutical targeting of membrane bound as opposed to the secreted form of the protein. Non-limiting examples of applications of the invention relating to targeting these RNA molecules include therapeutic pharmaceutical applications, cosmetic applications, veterinary applications, pharmaceutical discovery applications, molecular diagnostic and gene function applications, and gene mapping, for example using single nucleotide polymorphism mapping with siNA molecules of the invention. Such applications can be implemented using known gene sequences or from partial sequences available from an expressed sequence tag (EST).

[0161] In another embodiment, the siNA molecules of the invention are used to target conserved sequences corresponding to a HDAC gene family (e.g., any of class I, class II, and/or class III HDAC genes) or gene families such as HDAC gene families having homologous sequences. As such, siNA molecules targeting multiple HDAC gene or RNA targets can provide increased therapeutic effect. In one embodiment, the invention features the targeting (cleavage or inhibition of expression or function) of more than one target HDAC gene sequence using a single siNA molecule, by targeting the conserved sequences of the targeted HDAC genes.

[0162] In addition, siNA can be used to characterize pathways of gene function in a variety of applications. For example, the present invention can be used to inhibit the activity of target gene(s) in a pathway to determine the function of uncharacterized gene(s) in gene function analysis, mRNA function analysis, or translational analysis. The invention can be used to determine potential target gene pathways involved in various diseases and conditions toward pharmaceutical development. The invention can be used to understand pathways of gene expression involved in, for example, the progression and/or maintenance of hearing loss, deafness, tinnitus, movement or balance disorders, and any other diseases, traits, and conditions associated with target gene expression or activity in a subject or organism.

[0163] In one embodiment, siNA molecule(s) and/or methods of the invention are used to down regulate the expression of gene(s) that encode RNA referred to by Genbank Accession, for example, target genes encoding RNA sequence(s) referred to herein by Genbank Accession number, for example, Genbank Accession Nos. shown in Table I or U.S. Ser. No. 10/923,536 and U.S. Ser. No. 10/923,536, both incorporated by reference herein.

[0164] In one embodiment, the invention features a method comprising: (a) generating a library of siNA constructs having a predetermined complexity; and (b) assaying the siNA constructs of (a) above, under conditions suitable to determine RNAi target sites within the target HDAC RNA sequence. In one embodiment, the siNA molecules of (a) have strands of a fixed length, for example, about 23 nucleotides in length. In another embodiment, the siNA molecules of (a) are of differing length, for example having strands of about 15 to about 30 (e.g., about 15, 16, 17, 18, 19, 20, 21, 22, 23, 24, 25, 26, 27, 28, 29, or 30) nucleotides in length. In one embodiment, the assay can comprise a reconstituted in vitro siNA assay as described herein. In another embodiment, the assay can comprise a cell culture system in which target HDAC RNA is expressed. In another embodiment, fragments of target HDAC RNA are analyzed for detectable levels of cleavage, for example by gel electrophoresis, northern blot analysis, or RNAse protection assays, to determine the most suitable target site(s) within the target HDAC RNA sequence. The target HDAC RNA sequence can be obtained as is known in the art, for example, by cloning and/or transcription for in vitro systems, and by cellular expression in in vivo systems.

[0165] In one embodiment, the invention features a method comprising: (a) generating a randomized library of siNA constructs having a predetermined complexity, such as of 4^{N}, where N represents the number of base paired nucleotides in each of the siNA construct strands (eg. for a siNA construct having 21 nucleotide sense and antisense strands with 19 base pairs, the complexity would be 4¹⁹); and (b) assaying the siNA constructs of (a) above, under conditions suitable to determine RNAi target sites within the target HDAC RNA sequence. In another embodiment, the siNA molecules of (a) have strands of a fixed length, for example about 23 nucleotides in length. In yet another embodiment, the siNA molecules of (a) are of differing length, for example having strands of about 15 to about 30 (e.g., about 15, 16, 17, 18, 19, 20, 21, 22, 23, 24, 25, 26, 27, 28, 29, or 30) nucleotides in length. In one embodiment, the assay can comprise a reconstituted in vitro siNA assay as described in Example 6 herein. In another embodiment, the assay can comprise a cell culture system in which target HDAC RNA is expressed. In another embodiment, fragments of target HDAC RNA are analyzed for detectable levels of cleavage, for example, by gel electrophoresis, northern blot analysis, or RNAse protection assays, to determine the most suitable target HDAC site(s) within the target HDAC RNA sequence. The target HDAC RNA sequence can be obtained as is known in the art, for example, by cloning and/or transcription for in vitro systems, and by cellular expression in in vivo systems.

[0166] In another embodiment, the invention features a method comprising: (a) analyzing the sequence of a RNA target encoded by a target HDAC gene; (b) synthesizing one or more sets of siNA molecules having sequence complementary to one or more regions of the RNA of (a); and (c) assaying the siNA molecules of (b) under conditions suitable to determine RNAi targets within the target HDAC RNA sequence. In one embodiment, the siNA molecules of (b) have strands of a fixed length, for example about 23 nucleotides in length. In another embodiment, the siNA molecules of (b) are of differing length, for example having strands of about 15 to about 30 (e.g., about 15, 16, 17, 18, 19, 20, 21, 22, 23, 24, 25, 26, 27, 28, 29, or 30) nucleotides in length. In one embodiment, the assay can comprise a reconstituted in vitro siNA assay as described herein. In another embodiment, the assay can comprise a cell culture system in which target HDAC RNA is expressed. Fragments of target HDAC RNA are analyzed for detectable levels of cleavage, for example by gel electrophoresis, northern blot analysis, or RNAse protection assays, to determine the most suitable target HDAC site(s) within the target HDAC RNA sequence. The target HDAC RNA sequence can be obtained as is known in the art, for example, by cloning and/or transcription for in vitro systems, and by expression in in vivo systems.

[0167] By “target site” is meant a sequence within a target RNA (e.g., target HDAC RNA) that is “targeted” for cleavage mediated by a siNA construct which contains sequences within its antisense region that are complementary to the target sequence.

[0168] By “detectable level of cleavage” is meant cleavage of target RNA (and formation of cleaved product RNAs) to an extent sufficient to discern cleavage products above the background of RNAs produced by random degradation of the target RNA. Production of cleavage products from 1-5% of the target RNA is sufficient to detect above the background for most methods of detection.

[0169] In one embodiment, the invention features a composition comprising a siNA molecule of the invention, which can be chemically-modified, in a pharmaceutically acceptable carrier or diluent. In another embodiment, the invention features a pharmaceutical composition comprising siNA molecules of the invention, which can be chemically-modified, targeting one or more genes in a pharmaceutically acceptable carrier or diluent. In another embodiment, the invention features a method for diagnosing a disease, trait, or condition in a subject comprising administering to the subject a composition of the invention under conditions suitable for the diagnosis of the disease, trait, or condition in the subject. In another embodiment, the invention features a method for treating or preventing a disease, trait, or condition, such as hearing loss, deafness, tinnitus, and/or motion and balance disorders in a subject, comprising administering to the subject a composition of the invention under conditions suitable for the treatment or prevention of the disease, trait, or condition in the subject, alone or in conjunction with one or more other therapeutic compounds.

[0170] In another embodiment, the invention features a method for validating a gene target, comprising: (a) synthesizing a siNA molecule of the invention, which can be chemically-modified, wherein one of the siNA strands includes a sequence complementary to RNA of a target gene; (b) introducing the siNA molecule into a cell, tissue, subject, or organism under conditions suitable for modulating expression of the target gene in the cell, tissue, subject, or organism; and (c) determining the function of the gene by assaying for any phenotypic change in the cell, tissue, subject, or organism.

[0171] In another embodiment, the invention features a method for validating a target comprising: (a) synthesizing a siNA molecule of the invention, which can be chemically-modified, wherein one of the siNA strands includes a sequence complementary to RNA of a target gene; (b) introducing the siNA molecule into a biological system under conditions suitable for modulating expression of the target gene in the biological system; and (c) determining the function of the gene by assaying for any phenotypic change in the biological system.

[0172] By “biological system” is meant, material, in a purified or unpurified form, from biological sources, including but not limited to human or animal, wherein the system comprises the components required for RNAi activity. The term “biological system” includes, for example, a cell, tissue, subject, or organism, or extract thereof. The term biological system also includes reconstituted RNAi systems that can be used in an in vitro setting.

[0173] By “phenotypic change” is meant any detectable change to a cell that occurs in response to contact or treatment with a nucleic acid molecule of the invention (e.g., siNA). Such detectable changes include, but are not limited to, changes in shape, size, proliferation, motility, protein expression or RNA expression or other physical or chemical changes as can be assayed by methods known in the art. The detectable change can also include expression of reporter genes/molecules such as Green Florescent Protein (GFP) or various tags that are used to identify an expressed protein or any other cellular component that can be assayed.

[0174] In one embodiment, the invention features a kit containing a siNA molecule of the invention, which can be chemically-modified, that can be used to modulate the expression of a target gene in a biological system, including, for example, in a cell, tissue, subject, or organism. In another embodiment, the invention features a kit containing more than one siNA molecule of the invention, which can be chemically-modified, that can be used to modulate the expression of more than one target gene in a biological system, including, for example, in a cell, tissue, subject, or organism.

[0175] In one embodiment, the invention features a cell containing one or more siNA molecules of the invention, which can be chemically-modified. In another embodiment, the cell containing a siNA molecule of the invention is a mammalian cell. In yet another embodiment, the cell containing a siNA molecule of the invention is a human cell.

[0176] In one embodiment, the synthesis of a siNA molecule of the invention, which can be chemically-modified, comprises: (a) synthesis of two complementary strands of the siNA molecule; (b) annealing the two complementary strands together under conditions suitable to obtain a double-stranded siNA molecule. In another embodiment, synthesis of the two complementary strands of the siNA molecule is by solid phase oligonucleotide synthesis. In yet another embodiment, synthesis of the two complementary strands of the siNA molecule is by solid phase tandem oligonucleotide synthesis.

[0177] In one embodiment, the invention features a method for synthesizing a siNA duplex molecule comprising: (a) synthesizing a first oligonucleotide sequence strand of the siNA molecule, wherein the first oligonucleotide sequence strand comprises a cleavable linker molecule that can be used as a scaffold for the synthesis of the second oligonucleotide sequence strand of the siNA; (b) synthesizing the second oligonucleotide sequence strand of siNA on the scaffold of the first oligonucleotide sequence strand, wherein the second oligonucleotide sequence strand further comprises a chemical moiety than can be used to purify the siNA duplex; (c) cleaving the linker molecule of (a) under conditions suitable for the two siNA oligonucleotide strands to hybridize and form a stable duplex; and (d) purifying the siNA duplex utilizing the chemical moiety of the second oligonucleotide sequence strand. In one embodiment, cleavage of the linker molecule in (c) above takes place during deprotection of the oligonucleotide, for example, under hydrolysis conditions using an alkylamine base such as methylamine. In one embodiment, the method of synthesis comprises solid phase synthesis on a solid support such as controlled pore glass (CPG) or polystyrene, wherein the first sequence of (a) is synthesized on a cleavable linker, such as a succinyl linker, using the solid support as a scaffold. The cleavable linker in (a) used as a scaffold for synthesizing the second strand can comprise similar reactivity as the solid support derivatized linker, such that cleavage of the solid support derivatized linker and the cleavable linker of (a) takes place concomitantly. In another embodiment, the chemical moiety of (b) that can be used to isolate the attached oligonucleotide sequence comprises a trityl group, for example a dimethoxytrityl group, which can be employed in a trityl-on synthesis strategy as described herein. In yet another embodiment, the chemical moiety, such as a dimethoxytrityl group, is removed during purification, for example, using acidic conditions.

[0178] In a further embodiment, the method for siNA synthesis is a solution phase synthesis or hybrid phase synthesis wherein both strands of the siNA duplex are synthesized in tandem using a cleavable linker attached to the first sequence which acts a scaffold for synthesis of the second sequence. Cleavage of the linker under conditions suitable for hybridization of the separate siNA sequence strands results in formation of the double-stranded siNA molecule.

[0179] In another embodiment, the invention features a method for synthesizing a siNA duplex molecule comprising: (a) synthesizing one oligonucleotide sequence strand of the siNA molecule, wherein the sequence comprises a cleavable linker molecule that can be used as a scaffold for the synthesis of another oligonucleotide sequence; (b) synthesizing a second oligonucleotide sequence having complementarity to the first sequence strand on the scaffold of (a), wherein the second sequence comprises the other strand of the double-stranded siNA molecule and wherein the second sequence further comprises a chemical moiety than can be used to isolate the attached oligonucleotide sequence; (c) purifying the product of (b) utilizing the chemical moiety of the second oligonucleotide sequence strand under conditions suitable for isolating the full-length sequence comprising both siNA oligonucleotide strands connected by the cleavable linker and under conditions suitable for the two siNA oligonucleotide strands to hybridize and form a stable duplex. In one embodiment, cleavage of the linker molecule in (c) above takes place during deprotection of the oligonucleotide, for example, under hydrolysis conditions. In another embodiment, cleavage of the linker molecule in (c) above takes place after deprotection of the oligonucleotide. In another embodiment, the method of synthesis comprises solid phase synthesis on a solid support such as controlled pore glass (CPG) or polystyrene, wherein the first sequence of (a) is synthesized on a cleavable linker, such as a succinyl linker, using the solid support as a scaffold. The cleavable linker in (a) used as a scaffold for synthesizing the second strand can comprise similar reactivity or differing reactivity as the solid support derivatized linker, such that cleavage of the solid support derivatized linker and the cleavable linker of (a) takes place either concomitantly or sequentially. In one embodiment, the chemical moiety of (b) that can be used to isolate the attached oligonucleotide sequence comprises a trityl group, for example a dimethoxytrityl group.

[0180] In another embodiment, the invention features a method for making a double-stranded siNA molecule in a single synthetic process comprising: (a) synthesizing an oligonucleotide having a first and a second sequence, wherein the first sequence is complementary to the second sequence, and the first oligonucleotide sequence is linked to the second sequence via a cleavable linker, and wherein a terminal 5′-protecting group, for example, a 5′-O-dimethoxytrityl group (5′-O-DMT) remains on the oligonucleotide having the second sequence; (b) deprotecting the oligonucleotide whereby the deprotection results in the cleavage of the linker joining the two oligonucleotide sequences; and (c) purifying the product of (b) under conditions suitable for isolating the double-stranded siNA molecule, for example using a trityl-on synthesis strategy as described herein.

[0181] In another embodiment, the method of synthesis of siNA molecules of the invention comprises the teachings of Scaringe et al., U.S. Pat. Nos. 5,889,136; 6,008,400; and 6,111,086, incorporated by reference herein in their entirety.

[0182] In one embodiment, the invention features siNA constructs that mediate RNAi against a target polynucleotide (e.g., HDAC RNA or HDAC DNA target), wherein the siNA construct comprises one or more chemical modifications, for example, one or more chemical modifications having any of Formulae I-VII or any combination thereof that increases the nuclease resistance of the siNA construct.

[0183] In another embodiment, the invention features a method for generating siNA molecules with increased nuclease resistance comprising (a) introducing nucleotides having any of Formula I-VII or any combination thereof into a siNA molecule, and (b) assaying the siNA molecule of step (a) under conditions suitable for isolating siNA molecules having increased nuclease resistance.

[0184] In another embodiment, the invention features a method for generating siNA molecules with improved toxicologic profiles (e.g., having attenuated or no immunstimulatory properties) comprising (a) introducing nucleotides having any of Formula I-VII (e.g., siNA motifs referred to in Table IV) or any combination thereof into a siNA molecule, and (b) assaying the siNA molecule of step (a) under conditions suitable for isolating siNA molecules having improved toxicologic profiles.

[0185] In another embodiment, the invention features a method for generating siNA formulations with improved toxicologic profiles (e.g., having attenuated or no immunstimulatory properties) comprising (a) generating a siNA formulation comprising a siNA molecule of the invention and a delivery vehicle or delivery particle as described herein or as otherwise known in the art, and (b) assaying the siNA formualtion of step (a) under conditions suitable for isolating siNA formulations having improved toxicologic profiles.

[0186] In another embodiment, the invention features a method for generating siNA molecules that do not stimulate an interferon response (e.g., no interferon response or attenuated interferon response) in a cell, subject, or organism, comprising (a) introducing nucleotides having any of Formula I-VII (e.g., siNA motifs referred to in Table IV) or any combination thereof into a siNA molecule, and (b) assaying the siNA molecule of step (a) under conditions suitable for isolating siNA molecules that do not stimulate an interferon response.

[0187] In another embodiment, the invention features a method for generating siNA formulations that do not stimulate an interferon response (e.g., no interferon response or attenuated interferon response) in a cell, subject, or organism, comprising (a) generating a siNA formulation comprising a siNA molecule of the invention and a delivery vehicle or delivery particle as described herein or as otherwise known in the art, and (b) assaying the siNA formualtion of step (a) under conditions suitable for isolating siNA formulations that do not stimulate an interferon response. In one embodiment, the interferon comprises interferon alpha.

[0188] In another embodiment, the invention features a method for generating siNA molecules that do not stimulate an inflammatory or proinflammatory cytokine response (e.g., no cytokine response or attenuated cytokine response) in a cell, subject, or organism, comprising (a) introducing nucleotides having any of Formula I-VII (e.g., siNA motifs referred to in Table IV) or any combination thereof into a siNA molecule, and (b) assaying the siNA molecule of step (a) under conditions suitable for isolating siNA molecules that do not stimulate a cytokine response. In one embodiment, the cytokine comprises an interleukin such as interleukin-6 (IL-6) and/or tumor necrosis alpha (TNF-α).

[0189] In another embodiment, the invention features a method for generating siNA formulations that do not stimulate an inflammatory or proinflammatory cytokine response (e.g., no cytokine response or attenuated cytokine response) in a cell, subject, or organism, comprising (a) generating a siNA formulation comprising a siNA molecule of the invention and a delivery vehicle or delivery particle as described herein or as otherwise known in the art, and (b) assaying the siNA formualtion of step (a) under conditions suitable for isolating siNA formulations that do not stimulate a cytokine response. In one embodiment, the cytokine comprises an interleukin such as interleukin-6 (IL-6) and/or tumor necrosis alpha (TNF-α).

[0190] In another embodiment, the invention features a method for generating siNA molecules that do not stimulate Toll-like Receptor (TLR) response (e.g., no TLR response or attenuated TLR response) in a cell, subject, or organism, comprising (a) introducing nucleotides having any of Formula I-VII (e.g., siNA motifs referred to in Table IV) or any combination thereof into a siNA molecule, and (b) assaying the siNA molecule of step (a) under conditions suitable for isolating siNA molecules that do not stimulate a TLR response. In one embodiment, the TLR comprises TLR3, TLR7, TLR8 and/or TLR9.

[0191] In another embodiment, the invention features a method for generating siNA formulations that do not stimulate a Toll-like Receptor (TLR) response (e.g., no TLR response or attenuated TLR response) in a cell, subject, or organism, comprising (a) generating a siNA formulation comprising a siNA molecule of the invention and a delivery vehicle or delivery particle as described herein or as otherwise known in the art, and (b) assaying the siNA formualtion of step (a) under conditions suitable for isolating siNA formulations that do not stimulate a TLR response. In one embodiment, the TLR comprises TLR3, TLR7, TLR8 and/or TLR9.

[0192] In one embodiment, the invention features a chemically synthesized double stranded short interfering nucleic acid (siNA) molecule that directs cleavage of a target RNA via RNA interference (RNAi), wherein: (a) each strand of said siNA molecule is about 18 to about 38 nucleotides in length; (b) one strand of said siNA molecule comprises nucleotide sequence having sufficient complementarity to said target RNA for the siNA molecule to direct cleavage of the target RNA via RNA interference; and (c) wherein the nucleotide positions within said siNA molecule are chemically modified to reduce the immunostimulatory properties of the siNA molecule to a level below that of a corresponding unmodified siRNA molecule. Such siNA molecules are said to have an improved toxicologic profile compared to an unmodified or minimally modified siNA.

[0193] By “improved toxicologic profile”, is meant that the chemically modified or formulated siNA construct exhibits decreased toxicity in a cell, subject, or organism compared to an unmodified or unformulated siNA, or siNA molecule having fewer modifications or modifications that are less effective in imparting improved toxicology. In a non-limiting example, siNA molecules and formulations with improved toxicologic profiles are associated with reduced immunostimulatory properties, such as a reduced, decreased or attenuated immunostimulatory response in a cell, subject, or organism compared to an unmodified or unformulated siNA, or siNA molecule having fewer modifications or modifications that are less effective in imparting improved toxicology. Such an improved toxicologic profile is characterized by abrogated or reduced immunostimulation, such as reduction or abrogation of induction of interferons (e.g., interferon alpha), inflammatory cytokines (e.g., interleukins such as IL-6, and/or TNF-alpha), and/or toll like receptors (e.g., TLR-3, TLR-7, TLR-8, and/or TLR-9). In one embodiment, a siNA molecule or formulation with an improved toxicological profile comprises no ribonucleotides. In one embodiment, a siNA molecule or formulation with an improved toxicological profile comprises less than 5 ribonucleotides (e.g., 1, 2, 3, or 4 ribonucleotides). In one embodiment, a siNA molecule or formulation with an improved toxicological profile comprises Stab 7, Stab 8, Stab 11, Stab 12, Stab 13, Stab 16, Stab 17, Stab 18, Stab 19, Stab 20, Stab 23, Stab 24, Stab 25, Stab 26, Stab 27, Stab 28, Stab 29, Stab 30, Stab 31, Stab 32, Stab 33, Stab 34 or any combination thereof (see Table IV). Herein, numeric Stab chemistries include both 2′-fluoro and 2′-OCF3 versions of the chemistries shown in Table IV. For example, “Stab 7/8” refers to both Stab 7/8 and Stab 7F/8F etc. In one embodiment, a siNA molecule or formulation with an improved toxicological profile comprises a siNA molecule of the invention and a formulation as described in United States Patent Application Publication No. 20030077829, incorporated by reference herein in its entirety including the drawings.

[0194] In one embodiment, the level of immunostimulatory response associated with a given siNA molecule can be measured as is described herein or as is otherwise known in the art, for example by determining the level of PKR/interferon response, proliferation, B-cell activation, and/or cytokine production in assays to quantitate the immunostimulatory response of particular siNA molecules (see, for example, Leifer et al., 2003, J Immunother. 26, 313-9; and U.S. Pat. No. 5,968,909, incorporated in its entirety by reference). In one embodiment, the reduced immunostimulatory response is between about 10% and about 100% compared to an unmodified or minimally modified siRNA molecule, e.g., about 10%, 20%, 30%, 40%, 50%, 60%, 70%, 80%, 90% or 100% reduced immunostimulatory response. In one embodiment, the immunostimulatory response associated with a siNA molecule can be modulated by the degree of chemical modification. For example, a siNA molecule having between about 10% and about 100%, e.g., about 10%, 20%, 30%, 40%, 50%, 60%, 70%, 80%, 90% or 100% of the nucleotide positions in the siNA molecule modified can be selected to have a corresponding degree of immunostimulatory properties as described herein.

[0195] In one embodiment, the degree of reduced immunostimulatory response is selected for optimized RNAi activity. For example, retaining a certain degree of immunostimulation can be preferred to treat viral infection, where less than 100% reduction in immunostimulation may be preferred for maximal antiviral activity (e.g., about 10%, 20%, 30%, 40%, 50%, 60%, 70%, 80%, or 90% reduction in immunostimulation) whereas the inhibition of expression of an endogenous gene target may be preferred with siNA molecules that posess minimal immunostimulatory properties to prevent non-specific toxicity or off target effects (e.g., about 90% to about 100% reduction in immunostimulation).

[0196] In one embodiment, the invention features a chemically synthesized double stranded siNA molecule that directs cleavage of a target HDAC RNA via RNA interference (RNAi), wherein (a) each strand of said siNA molecule is about 18 to about 38 nucleotides in length; (b) one strand of said siNA molecule comprises nucleotide sequence having sufficient complementarity to said target RNA for the siNA molecule to direct cleavage of the target HDAC RNA via RNA interference; and (c) wherein one or more nucleotides of said siNA molecule are chemically modified to reduce the immunostimulatory properties of the siNA molecule to a level below that of a corresponding unmodified siNA molecule. In one embodiment, each starnd comprises at least about 18 nucleotides that are complementary to the nucleotides of the other strand.

[0197] In another embodiment, the siNA molecule comprising modified nucleotides to reduce the immunostimulatory properties of the siNA molecule comprises an antisense region having nucleotide sequence that is complemetary to a nucleotide sequence of a target gene or a protion thereof and further comprises a sense region, wherein said sense region comprises a nucleotide sequence substantially similar to the nucleotide sequence of said target gene or protion thereof. In one embodiment thereof, the antisense region and the sense region comprise about 18 to about 38 nucleotides, wherein said antisense region comprises at least about 18 nucleotides that are complementary to nucleotides of the sense region. In one embodiment thereof, the pyrimidine nucleotides in the sense region are 2′-O-methyl pyrimidine nucleotides. In another embodiment thereof, the purine nucleotides in the sense region are 2′-deoxy purine nucleotides. In yet another embodiment thereof, the pyrimidine nucleotides present in the sense region are 2′-deoxy-2′-fluoro pyrimidine nucleotides. In another embodiment thereof, the pyrimidine nucleotides of said antisense region are 2′-deoxy-2′-fluoro pyrimidine nucleotides. In yet another embodiment thereof, the purine nucleotides of said antisense region are 2′-O-methyl purine nucleotides. In still another embodiment thereof, the purine nucleotides present in said antisense region comprise 2′-deoxypurine nucleotides. In another embodiment, the antisense region comprises a phosphorothioate internucleotide linkage at the 3′ end of said antisense region. In another embodiment, the antisense region comprises a glyceryl modification at a 3′ end of said antisense region.

[0198] In other embodiments, the siNA molecule comprisisng modified nucleotides to reduce the immunostimulatory properties of the siNA molecule can comprise any of the structural features of siNA molecules described herein. In other embodiments, the siNA molecule comprising modified nucleotides to reduce the immunostimulatory properties of the siNA molecule can comprise any of the chemical modifications of siNA molecules described herein.

[0199] In one embodiment, the invention features a method for generating a chemically synthesized double stranded siNA molecule having chemically modified nucleotides to reduce the immunostimulatory properties of the siNA molecule, comprising (a) introducing one or more modified nucleotides in the siNA molecule, and (b) assaying the siNA molecule of step (a) under conditions suitable for isolating an siNA molecule having reduced immunostimulatory properties compared to a corresponding siNA molecule having unmodified nucleotides. Each strand of the siNA molecule is about 18 to about 38 nucleotides in length. One strand of the siNA molecule comprises nucleotide sequence having sufficient complementarity to the target RNA for the siNA molecule to direct cleavage of the target HDAC RNA via RNA interference. In one embodiment, the reduced immunostimulatory properties comprise an abrogated or reduced induction of inflammatory or proinflammatory cytokines, such as interleukin-6 (IL-6) or tumor necrosis alpha (TNF-α), in response to the siNA being introduced in a cell, tissue, or organism. In another embodiment, the reduced immunostimulatory properties comprise an abrogated or reduced induction of Toll Like Receptors (TLRs), such as TLR3, TLR7, TLR8 or TLR9, in response to the siNA being introduced in a cell, tissue, or organism. In another embodiment, the reduced immunostimulatory properties comprise an abrogated or reduced induction of interferons, such as interferon alpha, in response to the siNA being introduced in a cell, tissue, or organism.

[0200] In one embodiment, the invention features siNA constructs that mediate RNAi against a target HDAC polynucleotide, wherein the siNA construct comprises one or more chemical modifications described herein that modulates the binding affinity between the sense and antisense strands of the siNA construct.

[0201] In another embodiment, the invention features a method for generating siNA molecules with increased binding affinity between the sense and antisense strands of the siNA molecule comprising (a) introducing nucleotides having any of Formula I-VII or any combination thereof into a siNA molecule, and (b) assaying the siNA molecule of step (a) under conditions suitable for isolating siNA molecules having increased binding affinity between the sense and antisense strands of the siNA molecule.

[0202] In one embodiment, the invention features siNA constructs that mediate RNAi against a target HDAC polynucleotide, wherein the siNA construct comprises one or more chemical modifications described herein that modulates the binding affinity between the antisense strand of the siNA construct and a complementary target RNA sequence within a cell.

[0203] In one embodiment, the invention features siNA constructs that mediate RNAi against a target HDAC polynucleotide, wherein the siNA construct comprises one or more chemical modifications described herein that modulates the binding affinity between the antisense strand of the siNA construct and a complementary target HDAC DNA sequence within a cell.

[0204] In another embodiment, the invention features a method for generating siNA molecules with increased binding affinity between the antisense strand of the siNA molecule and a complementary target HDAC RNA sequence comprising (a) introducing nucleotides having any of Formula I-VII or any combination thereof into a siNA molecule, and (b) assaying the siNA molecule of step (a) under conditions suitable for isolating siNA molecules having increased binding affinity between the antisense strand of the siNA molecule and a complementary target HDAC RNA sequence.

[0205] In another embodiment, the invention features a method for generating siNA molecules with increased binding affinity between the antisense strand of the siNA molecule and a complementary target HDAC DNA sequence comprising (a) introducing nucleotides having any of Formula I-VII or any combination thereof into a siNA molecule, and (b) assaying the siNA molecule of step (a) under conditions suitable for isolating siNA molecules having increased binding affinity between the antisense strand of the siNA molecule and a complementary target HDAC DNA sequence.

[0206] In one embodiment, the invention features siNA constructs that mediate RNAi against a target HDAC polynucleotide, wherein the siNA construct comprises one or more chemical modifications described herein that modulate the polymerase activity of a cellular polymerase capable of generating additional endogenous siNA molecules having sequence homology to the chemically-modified siNA construct.

[0207] In another embodiment, the invention features a method for generating siNA molecules capable of mediating increased polymerase activity of a cellular polymerase capable of generating additional endogenous siNA molecules having sequence homology to a chemically-modified siNA molecule comprising (a) introducing nucleotides having any of Formula I-VII or any combination thereof into a siNA molecule, and (b) assaying the siNA molecule of step (a) under conditions suitable for isolating siNA molecules capable of mediating increased polymerase activity of a cellular polymerase capable of generating additional endogenous siNA molecules having sequence homology to the chemically-modified siNA molecule.

[0208] In one embodiment, the invention features chemically-modified siNA constructs that mediate RNAi against a target HDAC polynucleotide in a cell, wherein the chemical modifications do not significantly effect the interaction of siNA with a target HDAC RNA molecule, DNA molecule and/or proteins or other factors that are essential for RNAi in a manner that would decrease the efficacy of RNAi mediated by such siNA constructs.

[0209] In another embodiment, the invention features a method for generating siNA molecules with improved RNAi specificity against polynucleotide HDAC targets comprising (a) introducing nucleotides having any of Formula I-VII or any combination thereof into a siNA molecule, and (b) assaying the siNA molecule of step (a) under conditions suitable for isolating siNA molecules having improved RNAi specificity. In one embodiment, improved specificity comprises having reduced off target effects compared to an unmodified siNA molecule. For example, introduction of terminal cap moieties at the 3′-end, 5′-end, or both 3′ and 5′-ends of the sense strand or region of a siNA molecule of the invention can direct the siNA to have improved specificity by preventing the sense strand or sense region from acting as a template for RNAi activity against a corresponding target having complementarity to the sense strand or sense region.

[0210] In another embodiment, the invention features a method for generating siNA molecules with improved RNAi activity against a target HDAC polynucleotide comprising (a) introducing nucleotides having any of Formula I-VII or any combination thereof into a siNA molecule, and (b) assaying the siNA molecule of step (a) under conditions suitable for isolating siNA molecules having improved RNAi activity.

[0211] In yet another embodiment, the invention features a method for generating siNA molecules with improved RNAi activity against a target HDAC RNA comprising (a) introducing nucleotides having any of Formula I-VII or any combination thereof into a siNA molecule, and (b) assaying the siNA molecule of step (a) under conditions suitable for isolating siNA molecules having improved RNAi activity against the target HDAC RNA.

[0212] In yet another embodiment, the invention features a method for generating siNA molecules with improved RNAi activity against a target HDAC DNA comprising (a) introducing nucleotides having any of Formula I-VII or any combination thereof into a siNA molecule, and (b) assaying the siNA molecule of step (a) under conditions suitable for isolating siNA molecules having improved RNAi activity against the target HDAC DNA.

[0213] In one embodiment, the invention features siNA constructs that mediate RNAi against a target HDAC polynucleotide, wherein the siNA construct comprises one or more chemical modifications described herein that modulates the cellular uptake of the siNA construct, such as cholesterol conjugation of the siNA.

[0214] In another embodiment, the invention features a method for generating siNA molecules against a target HDAC polynucleotide with improved cellular uptake comprising (a) introducing nucleotides having any of Formula I-VII or any combination thereof into a siNA molecule, and (b) assaying the siNA molecule of step (a) under conditions suitable for isolating siNA molecules having improved cellular uptake.

[0215] In one embodiment, the invention features siNA constructs that mediate RNAi against a target HDAC polynucleotide, wherein the siNA construct comprises one or more chemical modifications described herein that increases the bioavailability of the siNA construct, for example, by attaching polymeric conjugates such as polyethyleneglycol or equivalent conjugates that improve the pharmacokinetics of the siNA construct, or by attaching conjugates that target specific tissue types or cell types in vivo. Non-limiting examples of such conjugates are described in Vargeese et al., U.S. Ser. No. 10/201,394 incorporated by reference herein.

[0216] In one embodiment, the invention features a method for generating siNA molecules of the invention with improved bioavailability comprising (a) introducing a conjugate into the structure of a siNA molecule, and (b) assaying the siNA molecule of step (a) under conditions suitable for isolating siNA molecules having improved bioavailability. Such conjugates can include ligands for cellular receptors, such as peptides derived from naturally occurring protein ligands; protein localization sequences, including cellular ZIP code sequences; antibodies; nucleic acid aptamers; vitamins and other co-factors, such as folate and N-acetylgalactosamine; polymers, such as polyethyleneglycol (PEG); phospholipids; cholesterol; cholesterol derivatives, polyamines, such as spermine or spermidine; and others.

[0217] In one embodiment, the invention features a double stranded short interfering nucleic acid (siNA) molecule that comprises a first nucleotide sequence complementary to a target HDAC RNA sequence or a portion thereof, and a second sequence having complementarity to said first sequence, wherein said second sequence is chemically modified in a manner that it can no longer act as a guide sequence for efficiently mediating RNA interference and/or be recognized by cellular proteins that facilitate RNAi. In one embodiment, the first nucleotide sequence of the siNA is chemically modified as described herein. In one embodiment, the first nucleotide sequence of the siNA is not modified (e.g., is all RNA).

[0218] In one embodiment, the invention features a double stranded short interfering nucleic acid (siNA) molecule that comprises a first nucleotide sequence complementary to a target HDAC RNA sequence or a portion thereof, and a second sequence having complementarity to said first sequence, wherein the second sequence is designed or modified in a manner that prevents its entry into the RNAi pathway as a guide sequence or as a sequence that is complementary to a target nucleic acid (e.g., RNA) sequence. In one embodiment, the first nucleotide sequence of the siNA is chemically modified as described herein. In one embodiment, the first nucleotide sequence of the siNA is not modified (e.g., is all RNA). Such design or modifications are expected to enhance the activity of siNA and/or improve the specificity of siNA molecules of the invention. These modifications are also expected to minimize any off-target effects and/or associated toxicity.

[0219] In one embodiment, the invention features a double stranded short interfering nucleic acid (siNA) molecule that comprises a first nucleotide sequence complementary to a target HDAC RNA sequence or a portion thereof, and a second sequence having complementarity to said first sequence, wherein said second sequence is incapable of acting as a guide sequence for mediating RNA interference. In one embodiment, the first nucleotide sequence of the siNA is chemically modified as described herein. In one embodiment, the first nucleotide sequence of the siNA is not modified (e.g., is all RNA).

[0220] In one embodiment, the invention features a double stranded short interfering nucleic acid (siNA) molecule that comprises a first nucleotide sequence complementary to a target HDAC RNA sequence or a portion thereof, and a second sequence having complementarity to said first sequence, wherein said second sequence does not have a terminal 5′-hydroxyl (5′-OH) or 5′-phosphate group.

[0221] In one embodiment, the invention features a double stranded short interfering nucleic acid (siNA) molecule that comprises a first nucleotide sequence complementary to a target HDAC RNA sequence or a portion thereof, and a second sequence having complementarity to said first sequence, wherein said second sequence comprises a terminal cap moiety at the 5′-end of said second sequence. In one embodiment, the terminal cap moiety comprises an inverted abasic, inverted deoxy abasic, inverted nucleotide moiety, a group shown in FIG. 10, an alkyl or cycloalkyl group, a heterocycle, or any other group that prevents RNAi activity in which the second sequence serves as a guide sequence or template for RNAi.

[0222] In one embodiment, the invention features a double stranded short interfering nucleic acid (siNA) molecule that comprises a first nucleotide sequence complementary to a target HDAC RNA sequence or a portion thereof, and a second sequence having complementarity to said first sequence, wherein said second sequence comprises a terminal cap moiety at the 5′-end and 3′-end of said second sequence. In one embodiment, each terminal cap moiety individually comprises an inverted abasic, inverted deoxy abasic, inverted nucleotide moiety, a group shown in FIG. 10, an alkyl or cycloalkyl group, a heterocycle, or any other group that prevents RNAi activity in which the second sequence serves as a guide sequence or template for RNAi.

[0223] In one embodiment, the invention features a method for generating siNA molecules of the invention with improved specificity for down regulating or inhibiting the expression of a target nucleic acid (e.g., a HDAC DNA or HDAC RNA such as a HDAC gene or its corresponding RNA), comprising (a) introducing one or more chemical modifications into the structure of a siNA molecule, and (b) assaying the siNA molecule of step (a) under conditions suitable for isolating siNA molecules having improved specificity. In another embodiment, the chemical modification used to improve specificity comprises terminal cap modifications at the 5′-end, 3′-end, or both 5′ and 3′-ends of the siNA molecule. The terminal cap modifications can comprise, for example, structures shown in FIG. 10 (e.g. inverted deoxyabasic moieties) or any other chemical modification that renders a portion of the siNA molecule (e.g. the sense strand) incapable of mediating RNA interference against an off target nucleic acid sequence. In a non-limiting example, a siNA molecule is designed such that only the antisense sequence of the siNA molecule can serve as a guide sequence for RISC mediated degradation of a corresponding target RNA sequence. This can be accomplished by rendering the sense sequence of the siNA inactive by introducing chemical modifications to the sense strand that preclude recognition of the sense strand as a guide sequence by RNAi machinery. In one embodiment, such chemical modifications comprise any chemical group at the 5′-end of the sense strand of the siNA, or any other group that serves to render the sense strand inactive as a guide sequence for mediating RNA interference. These modifications, for example, can result in a molecule where the 5′-end of the sense strand no longer has a free 5′-hydroxyl (5′-OH) or a free 5′-phosphate group (e.g., phosphate, diphosphate, triphosphate, cyclic phosphate etc.). Non-limiting examples of such siNA constructs are described herein, such as “Stab 9/10”, “Stab 7/8”, “Stab 7/19”, “Stab 17/22”, “Stab 23/24”, “Stab 24/25”, and “Stab 24/26” (e.g., any siNA having Stab 7, 9, 17, 23, or 24 sense strands) chemistries and variants thereof (see Table IV) wherein the 5′-end and 3′-end of the sense strand of the siNA do not comprise a hydroxyl group or phosphate group. Herein, numeric Stab chemistries include both 2′-fluoro and 2′-OCF3 versions of the chemistries shown in Table IV. For example, “Stab 7/8” refers to both Stab 7/8 and Stab 7F/8F etc.

[0224] In one embodiment, the invention features a method for generating siNA molecules of the invention with improved specificity for down regulating or inhibiting the expression of a target nucleic acid (e.g., a HDAC DNA or HDAC RNA such as a HDAC gene or its corresponding RNA), comprising introducing one or more chemical modifications into the structure of a siNA molecule that prevent a strand or portion of the siNA molecule from acting as a template or guide sequence for RNAi activity. In one embodiment, the inactive strand or sense region of the siNA molecule is the sense strand or sense region of the siNA molecule, i.e. the strand or region of the siNA that does not have complementarity to the target nucleic acid sequence. In one embodiment, such chemical modifications comprise any chemical group at the 5′-end of the sense strand or region of the siNA that does not comprise a 5′-hydroxyl (5′-OH) or 5′-phosphate group, or any other group that serves to render the sense strand or sense region inactive as a guide sequence for mediating RNA interference. Non-limiting examples of such siNA constructs are described herein, such as “Stab 9/10”, “Stab 7/8”, “Stab 7/19”, “Stab 17/22”, “Stab 23/24”, “Stab 24/25”, and “Stab 24/26” (e.g., any siNA having Stab 7, 9, 17, 23, or 24 sense strands) chemistries and variants thereof (see Table IV) wherein the 5′-end and 3′-end of the sense strand of the siNA do not comprise a hydroxyl group or phosphate group. Herein, numeric Stab chemistries include both 2′-fluoro and 2′-OCF3 versions of the chemistries shown in Table IV. For example, “Stab 7/8” refers to both Stab 7/8 and Stab 7F/8F etc.

[0225] In one embodiment, the invention features a method for screening siNA molecules that are active in mediating RNA interference against a target HDAC nucleic acid sequence comprising (a) generating a plurality of unmodified siNA molecules, (b) screening the siNA molecules of step (a) under conditions suitable for isolating siNA molecules that are active in mediating RNA interference against the target HDAC nucleic acid sequence, and (c) introducing chemical modifications (e.g. chemical modifications as described herein or as otherwise known in the art) into the active siNA molecules of (b). In one embodiment, the method further comprises re-screening the chemically modified siNA molecules of step (c) under conditions suitable for isolating chemically modified siNA molecules that are active in mediating RNA interference against the target HDAC nucleic acid sequence.

[0226] In one embodiment, the invention features a method for screening chemically modified siNA molecules that are active in mediating RNA interference against a target HDAC nucleic acid sequence comprising (a) generating a plurality of chemically modified siNA molecules (e.g. siNA molecules as described herein or as otherwise known in the art), and (b) screening the siNA molecules of step (a) under conditions suitable for isolating chemically modified siNA molecules that are active in mediating RNA interference against the target HDAC nucleic acid sequence.

[0227] The term “ligand” refers to any compound or molecule, such as a drug, peptide, hormone, or neurotransmitter, that is capable of interacting with another compound, such as a receptor, either directly or indirectly. The receptor that interacts with a ligand can be present on the surface of a cell or can alternately be an intercellular receptor. Interaction of the ligand with the receptor can result in a biochemical reaction, or can simply be a physical interaction or association.

[0228] In another embodiment, the invention features a method for generating siNA molecules of the invention with improved bioavailability comprising (a) introducing an excipient formulation to a siNA molecule, and (b) assaying the siNA molecule of step (a) under conditions suitable for isolating siNA molecules having improved bioavailability. Such excipients include polymers such as cyclodextrins, lipids, cationic lipids, polyamines, phospholipids, nanoparticles, receptors, ligands, and others.

[0229] In another embodiment, the invention features a method for generating siNA molecules of the invention with improved bioavailability comprising (a) introducing nucleotides having any of Formulae I-VII or any combination thereof into a siNA molecule, and (b) assaying the siNA molecule of step (a) under conditions suitable for isolating siNA molecules having improved bioavailability.

[0230] In another embodiment, polyethylene glycol (PEG) can be covalently attached to siNA compounds of the present invention. The attached PEG can be any molecular weight, preferably from about 100 to about 50,000 daltons (Da).

[0231] The present invention can be used alone or as a component of a kit having at least one of the reagents necessary to carry out the in vitro or in vivo introduction of RNA to test samples and/or subjects. For example, preferred components of the kit include a siNA molecule of the invention and a vehicle that promotes introduction of the siNA into cells of interest as described herein (e.g., using lipids and other methods of transfection known in the art, see for example Beigelman et al, U.S. Pat. No. 6,395,713). The kit can be used for target validation, such as in determining gene function and/or activity, or in drug optimization, and in drug discovery (see for example Usman et al., U.S. Ser. No. 60/402,996). Such a kit can also include instructions to allow a user of the kit to practice the invention.

[0232] The term “short interfering nucleic acid”, “siNA”, “short interfering RNA”, “siRNA”, “short interfering nucleic acid molecule”, “short interfering oligonucleotide molecule”, or “chemically-modified short interfering nucleic acid molecule” as used herein refers to any nucleic acid molecule capable of inhibiting or down regulating gene expression or viral replication, for example by mediating RNA interference “RNAi” or gene silencing in a sequence-specific manner; see for example Zamore et al., 2000, Cell, 101, 25-33; Bass, 2001, Nature, 411, 428-429; Elbashir et al., 2001, Nature, 411, 494-498; and Kreutzer et al., International PCT Publication No. WO 00/44895; Zernicka-Goetz et al., International PCT Publication No. WO 01/36646; Fire, International PCT Publication No. WO 99/32619; Plaetinck et al., International PCT Publication No. WO 00/01846; Mello and Fire, International PCT Publication No. WO 01/29058; Deschamps-Depaillette, International PCT Publication No. WO 99/07409; and Li et al., International PCT Publication No. WO 00/44914; Allshire, 2002, Science, 297, 1818-1819; Volpe et al., 2002, Science, 297, 1833-1837; Jenuwein, 2002, Science, 297, 2215-2218; and Hall et al., 2002, Science, 297, 2232-2237; Hutvagner and Zamore, 2002, Science, 297, 2056-60; McManus et al., 2002, RNA, 8, 842-850; Reinhart et al., 2002, Gene & Dev., 16, 1616-1626; and Reinhart & Bartel, 2002, Science, 297, 1831). Non limiting examples of siNA molecules of the invention are shown in FIGS. 4-6, and Tables II-III herein. For example the siNA can be a double-stranded polynucleotide molecule comprising self-complementary sense and antisense regions, wherein the antisense region comprises nucleotide sequence that is complementary to nucleotide sequence in a target nucleic acid molecule or a portion thereof and the sense region having nucleotide sequence corresponding to the target nucleic acid sequence or a portion thereof. The siNA can be assembled from two separate oligonucleotides, where one strand is the sense strand and the other is the antisense strand, wherein the antisense and sense strands are self-complementary (i.e., each strand comprises nucleotide sequence that is complementary to nucleotide sequence in the other strand; such as where the antisense strand and sense strand form a duplex or double stranded structure, for example wherein the double stranded region is about 15 to about 30, e.g., about 15, 16, 17, 18, 19, 20, 21, 22, 23, 24, 25, 26, 27, 28, 29 or 30 base pairs; the antisense strand comprises nucleotide sequence that is complementary to nucleotide sequence in a target nucleic acid molecule or a portion thereof and the sense strand comprises nucleotide sequence corresponding to the target nucleic acid sequence or a portion thereof (e.g., about 15 to about 25 or more nucleotides of the siNA molecule are complementary to the target nucleic acid or a portion thereof). Alternatively, the siNA is assembled from a single oligonucleotide, where the self-complementary sense and antisense regions of the siNA are linked by means of a nucleic acid based or non-nucleic acid-based linker(s). The siNA can be a polynucleotide with a duplex, asymmetric duplex, hairpin or asymmetric hairpin secondary structure, having self-complementary sense and antisense regions, wherein the antisense region comprises nucleotide sequence that is complementary to nucleotide sequence in a separate target nucleic acid molecule or a portion thereof and the sense region having nucleotide sequence corresponding to the target nucleic acid sequence or a portion thereof. The siNA can be a circular single-stranded polynucleotide having two or more loop structures and a stem comprising self-complementary sense and antisense regions, wherein the antisense region comprises nucleotide sequence that is complementary to nucleotide sequence in a target nucleic acid molecule or a portion thereof and the sense region having nucleotide sequence corresponding to the target nucleic acid sequence or a portion thereof, and wherein the circular polynucleotide can be processed either in vivo or in vitro to generate an active siNA molecule capable of mediating RNAi. The siNA can also comprise a single stranded polynucleotide having nucleotide sequence complementary to nucleotide sequence in a target nucleic acid molecule or a portion thereof (for example, where such siNA molecule does not require the presence within the siNA molecule of nucleotide sequence corresponding to the target nucleic acid sequence or a portion thereof), wherein the single stranded polynucleotide can further comprise a terminal phosphate group, such as a 5′-phosphate (see for example Martinez et al., 2002, Cell., 110, 563-574 and Schwarz et al., 2002, Molecular Cell, 10, 537-568), or 5′,3′-diphosphate. In certain embodiments, the siNA molecule of the invention comprises separate sense and antisense sequences or regions, wherein the sense and antisense regions are covalently linked by nucleotide or non-nucleotide linkers molecules as is known in the art, or are alternately non-covalently linked by ionic interactions, hydrogen bonding, van der waals interactions, hydrophobic interactions, and/or stacking interactions. In certain embodiments, the siNA molecules of the invention comprise nucleotide sequence that is complementary to nucleotide sequence of a target gene. In another embodiment, the siNA molecule of the invention interacts with nucleotide sequence of a target gene in a manner that causes inhibition of expression of the target gene. As used herein, siNA molecules need not be limited to those molecules containing only RNA, but further encompasses chemically-modified nucleotides and non-nucleotides. In certain embodiments, the short interfering nucleic acid molecules of the invention lack 2′-hydroxy (2′-OH) containing nucleotides. Applicant describes in certain embodiments short interfering nucleic acids that do not require the presence of nucleotides having a 2′-hydroxy group for mediating RNAi and as such, short interfering nucleic acid molecules of the invention optionally do not include any ribonucleotides (e.g., nucleotides having a 2′-OH group). Such siNA molecules that do not require the presence of ribonucleotides within the siNA molecule to support RNAi can however have an attached linker or linkers or other attached or associated groups, moieties, or chains containing one or more nucleotides with 2′-OH groups. Optionally, siNA molecules can comprise ribonucleotides at about 5, 10, 20, 30, 40, or 50% of the nucleotide positions. The modified short interfering nucleic acid molecules of the invention can also be referred to as short interfering modified oligonucleotides “siMON.” As used herein, the term siNA is meant to be equivalent to other terms used to describe nucleic acid molecules that are capable of mediating sequence specific RNAi, for example short interfering RNA (siRNA), double-stranded RNA (dsRNA), micro-RNA (miRNA), short hairpin RNA (shRNA), short interfering oligonucleotide, short interfering nucleic acid, short interfering modified oligonucleotide, chemically-modified siRNA, post-transcriptional gene silencing RNA (ptgsRNA), and others. In addition, as used herein, the term RNAi is meant to be equivalent to other terms used to describe sequence specific RNA interference, such as post transcriptional gene silencing, translational inhibition, or epigenetics. For example, siNA molecules of the invention can be used to epigenetically silence genes at both the post-transcriptional level or the pre-transcriptional level. In a non-limiting example, epigenetic modulation of gene expression by siNA molecules of the invention can result from siNA mediated modification of chromatin structure or methylation pattern to alter gene expression (see, for example, Verdel et al., 2004, Science, 303, 672-676; Pal-Bhadra et al., 2004, Science, 303, 669-672; Allshire, 2002, Science, 297, 1818-1819; Volpe et al., 2002, Science, 297, 1833-1837; Jenuwein, 2002, Science, 297, 2215-2218; and Hall et al., 2002, Science, 297, 2232-2237). In another non-limiting example, modulation of gene expression by siNA molecules of the invention can result from siNA mediated cleavage of RNA (either coding or non-coding RNA) via RISC, or alternately, translational inhibition as is known in the art.

[0233] In one embodiment, a siNA molecule of the invention is a duplex forming oligonucleotide “DFO”, (see for example FIGS. 14-15 and Vaish et al., U.S. Ser. No. 10/727,780 filed Dec. 3, 2003 and International PCT Application No. US04/16390, filed May 24, 2004).

[0234] In one embodiment, a siNA molecule of the invention is a multifunctional siNA, (see for example FIGS. 16-21 and Jadhav et al., U.S. Ser. No. 60/543,480 filed Feb. 10, 2004 and International PCT Application No. US04/16390, filed May 24, 2004). In one embodiment, the multifunctional siNA of the invention can comprise sequence targeting, for example, two or more regions of target RNA (see for example target sequences in Tables II and III).

[0235] By “asymmetric hairpin” as used herein is meant a linear siNA molecule comprising an antisense region, a loop portion that can comprise nucleotides or non-nucleotides, and a sense region that comprises fewer nucleotides than the antisense region to the extent that the sense region has enough complementary nucleotides to base pair with the antisense region and form a duplex with loop. For example, an asymmetric hairpin siNA molecule of the invention can comprise an antisense region having length sufficient to mediate RNAi in a cell or in vitro system (e.g. about 15 to about 30, or about 15, 16, 17, 18, 19, 20, 21, 22, 23, 24, 25, 26, 27, 28, 29, or 30 nucleotides) and a loop region comprising about 4 to about 12 (e.g., about 4, 5, 6, 7, 8, 9, 10, 11, or 12) nucleotides, and a sense region having about 3 to about 25 (e.g., about 3, 4, 5, 6, 7, 8, 9, 10, 11, 12, 13, 14, 15, 16, 17, 18, 19, 20, 21, 22, 23, 24, or 25) nucleotides that are complementary to the antisense region. The asymmetric hairpin siNA molecule can also comprise a 5′-terminal phosphate group that can be chemically modified. The loop portion of the asymmetric hairpin siNA molecule can comprise nucleotides, non-nucleotides, linker molecules, or conjugate molecules as described herein.

[0236] By “asymmetric duplex” as used herein is meant a siNA molecule having two separate strands comprising a sense region and an antisense region, wherein the sense region comprises fewer nucleotides than the antisense region to the extent that the sense region has enough complementary nucleotides to base pair with the antisense region and form a duplex. For example, an asymmetric duplex siNA molecule of the invention can comprise an antisense region having length sufficient to mediate RNAi in a cell or in vitro system (e.g., about 15 to about 30, or about 15, 16, 17, 18, 19, 20, 21, 22, 23, 24, 25, 26, 27, 28, 29, or 30 nucleotides) and a sense region having about 3 to about 25 (e.g., about 3, 4, 5, 6, 7, 8, 9, 10, 11, 12, 13, 14, 15, 16, 17, 18, 19, 20, 21, 22, 23, 24, or 25) nucleotides that are complementary to the antisense region.

[0237] By “modulate” is meant that the expression of the gene, or level of a RNA molecule or equivalent RNA molecules encoding one or more proteins or protein subunits, or activity of one or more proteins or protein subunits is up regulated or down regulated, such that expression, level, or activity is greater than or less than that observed in the absence of the modulator. For example, the term “modulate” can mean “inhibit,” but the use of the word “modulate” is not limited to this definition.

[0238] By “inhibit”, “down-regulate”, or “reduce”, it is meant that the expression of the gene, or level of RNA molecules or equivalent RNA molecules encoding one or more proteins or protein subunits, or activity of one or more proteins or protein subunits, is reduced below that observed in the absence of the nucleic acid molecules (e.g., siNA) of the invention. In one embodiment, inhibition, down-regulation or reduction with an siNA molecule is below that level observed in the presence of an inactive or attenuated molecule. In another embodiment, inhibition, down-regulation, or reduction with siNA molecules is below that level observed in the presence of, for example, an siNA molecule with scrambled sequence or with mismatches. In another embodiment, inhibition, down-regulation, or reduction of gene expression with a nucleic acid molecule of the instant invention is greater in the presence of the nucleic acid molecule than in its absence. In one embodiment, inhibition, down regulation, or reduction of gene expression is associated with post transcriptional silencing, such as RNAi mediated cleavage of a target nucleic acid molecule (e.g. RNA) or inhibition of translation. In one embodiment, inhibition, down regulation, or reduction of gene expression is associated with pretranscriptional silencing, such as by alterations in DNA methylation patterns and DNA chromatin structure.

[0239] By “gene”, or “target gene” or “target DNA”, is meant a nucleic acid that encodes an RNA, for example, nucleic acid sequences including, but not limited to, structural genes encoding a polypeptide. A gene or target gene can also encode a functional RNA (fRNA) or non-coding RNA (ncRNA), such as small temporal RNA (stRNA), micro RNA (miRNA), small nuclear RNA (snRNA), short interfering RNA (siRNA), small nucleolar RNA (snRNA), ribosomal RNA (rRNA), transfer RNA (tRNA) and precursor RNAs thereof. Such non-coding RNAs can serve as target nucleic acid molecules for siNA mediated RNA interference in modulating the activity of fRNA or ncRNA involved in functional or regulatory cellular processes. Abberant fRNA or ncRNA activity leading to disease can therefore be modulated by siNA molecules of the invention. siNA molecules targeting fRNA and ncRNA can also be used to manipulate or alter the genotype or phenotype of a subject, organism or cell, by intervening in cellular processes such as genetic imprinting, transcription, translation, or nucleic acid processing (e.g., transamination, methylation etc.). The target gene can be a gene derived from a cell, an endogenous gene, a transgene, or exogenous genes such as genes of a pathogen, for example a virus, which is present in the cell after infection thereof. The cell containing the target gene can be derived from or contained in any organism, for example a plant, animal, protozoan, virus, bacterium, or fungus. Non-limiting examples of plants include monocots, dicots, or gymnosperms. Non-limiting examples of animals include vertebrates or invertebrates. Non-limiting examples of fungi include molds or yeasts. For a review, see for example Snyder and Gerstein, 2003, Science, 300, 258-260.

[0240] By “non-canonical base pair” is meant any non-Watson Crick base pair, such as mismatches and/or wobble base pairs, including flipped mismatches, single hydrogen bond mismatches, trans-type mismatches, triple base interactions, and quadruple base interactions. Non-limiting examples of such non-canonical base pairs include, but are not limited to, AC reverse Hoogsteen, AC wobble, AU reverse Hoogsteen, GU wobble, AA N7 amino, CC 2-carbonyl-amino(H1)-N-3-amino(H2), GA sheared, UC 4-carbonyl-amino, UU imino-carbonyl, AC reverse wobble, AU Hoogsteen, AU reverse Watson Crick, CG reverse Watson Crick, GC N3-amino-amino N3, AA N1-amino symmetric, AA N7-amino symmetric, GA N7-N1 amino-carbonyl, GA+ carbonyl-amino N7-N1, GG N1-carbonyl symmetric, GG N3-amino symmetric, CC carbonyl-amino symmetric, CC N3-amino symmetric, UU 2-carbonyl-imino symmetric, UU 4-carbonyl-imino symmetric, AA amino-N3, AA N1-amino, AC amino 2-carbonyl, AC N3-amino, AC N7-amino, AU amino-4-carbonyl, AU N1-imino, AU N3-imino, AU N7-imino, CC carbonyl-amino, GA amino-N1, GA amino-N7, GA carbonyl-amino, GA N3-amino, GC amino-N3, GC carbonyl-amino, GC N3-amino, GC N7-amino, GG amino-N7, GG carbonyl-imino, GG N7-amino, GU amino-2-carbonyl, GU carbonyl-imino, GU imino-2-carbonyl, GU N7-imino, psiU imino-2-carbonyl, UC 4-carbonyl-amino, UC imino-carbonyl, UU imino-4-carbonyl, AC C2-H-N3, GA carbonyl-C2-H, UU imino-4-carbonyl 2 carbonyl-C5-H, AC amino(A) N3(C)-carbonyl, GC imino amino-carbonyl, Gpsi imino-2-carbonyl amino-2-carbonyl, and GU imino amino-2-carbonyl base pairs.

[0241] By “histone deacetylase” or “HDAC” as used herein is meant, any histone deacetylate protein, peptide, or polypeptide having HDAC activity (e.g., HDAC 1, HDAC 2, HCAC 3, HDAC 4, HDAC 5, HDAC 6, HDAC 7, HDAC 8, HDAC 9a, HDAC 9b, HDAC 10, and/or HDAC 11, and/or SIR T1, 2, 3, 4, 5, 6, and/or 7) such as encoded by HDAC or Sirtuin Genbank Accession Nos. shown in Table I and in U.S. Ser. No. 10/923,536 and U.S. Ser. No. 10/923,536, both incorporated by reference herein. The term HDAC also refers to nucleic acid sequences encoding any HDAC protein, peptide, or polypeptide having HDAC activity. The term “HDAC” is also meant to include other HDAC encoding sequence, such as other histone deacetylase isoforms, mutant HDAC genes, splice variants of HDAC genes, HDAC gene polymorphisms, and non-coding or regulatory HDAC polynucleotide sequences.

[0242] By “target” as used herein is meant, any target protein, peptide, or polypeptide, such as encoded by Genbank Accession Nos. shown in U.S. Ser. No. 10/923,536 and U.S. Ser. No. 10/923,536, both incorporated by reference herein. The term “target” also refers to nucleic acid sequences or target polynucleotide sequence encoding any target protein, peptide, or polypeptide, such as proteins, peptides, or polypeptides encoded by sequences having Genbank Accession Nos. shown in U.S. Ser. No. 10/923,536 and U.S. Ser. No. 10/923,536. The term “target” is also meant to include other sequences, such as differing isoforms, mutant target genes, splice variants of target polynucleotides, target polymorphisms, and non-coding or regulatory polynucleotide sequences.

[0243] By “homologous sequence” is meant, a nucleotide sequence that is shared by one or more polynucleotide sequences, such as genes, gene transcripts and/or non-coding polynucleotides. For example, a homologous sequence can be a nucleotide sequence that is shared by two or more genes encoding related but different proteins, such as different members of a gene family, different protein epitopes, different protein isoforms or completely divergent genes, such as a cytokine and its corresponding receptors. A homologous sequence can be a nucleotide sequence that is shared by two or more non-coding polynucleotides, such as noncoding DNA or RNA, regulatory sequences, introns, and sites of transcriptional control or regulation. Homologous sequences can also include conserved sequence regions shared by more than one polynucleotide sequence. Homology does not need to be perfect homology (e.g., 100%), as partially homologous sequences are also contemplated by the instant invention (e.g., 99%, 98%, 97%, 96%, 95%, 94%, 93%, 92%, 91%, 90%, 89%, 88%, 87%, 86%, 85%, 84%, 83%, 82%, 81%, 80% etc.).

[0244] By “conserved sequence region” is meant, a nucleotide sequence of one or more regions in a polynucleotide does not vary significantly between generations or from one biological system, subject, or organism to another biological system, subject, or organism. The polynucleotide can include both coding and non-coding DNA and RNA.

[0245] By “sense region” is meant a nucleotide sequence of a siNA molecule having complementarity to an antisense region of the siNA molecule. In addition, the sense region of a siNA molecule can comprise a nucleic acid sequence having homology with a target nucleic acid sequence.

[0246] By “antisense region” is meant a nucleotide sequence of a siNA molecule having complementarity to a target nucleic acid sequence. In addition, the antisense region of a siNA molecule can optionally comprise a nucleic acid sequence having complementarity to a sense region of the siNA molecule.

[0247] By “target nucleic acid” or “target polynucleotide” is meant any nucleic acid sequence whose expression or activity is to be modulated (e.g., HDAC). The target nucleic acid can be DNA or RNA. In one embodiment, a target nucleic acid of the invention is target HDAC RNA or HDAC DNA.

[0248] By “complementarity” is meant that a nucleic acid can form hydrogen bond(s) with another nucleic acid sequence by either traditional Watson-Crick or other non-traditional types as described herein. In one embodiment, a double stranded nucleic acid molecule of the invention, such as an siNA molecule, wherein each strand is between 15 and 30 nucleotides in length, comprises between about 10% and about 100% (e.g., about 10%, 20%, 30%, 40%, 50%, 60%, 70%, 80%, 90%, or 100%) complementarity between the two strands of the double stranded nucleic acid molecule. In another embodiment, a double stranded nucleic acid molecule of the invention, such as an siNA molecule, where one strand is the sense strand and the other stand is the antisense strand, wherein each strand is between 15 and 30 nucleotides in length, comprises between at least about 10% and about 100% (e.g., at least about 10%, 20%, 30%, 40%, 50%, 60%, 70%, 80%, 90%, or 100%) complementarity between the nucleotide sequence in the antisense strand of the double stranded nucleic acid molecule and the nucleotide sequence of its corresponding target nucleic acid molecule, such as a target RNA or target mRNA or viral RNA. In one embodiment, a double stranded nucleic acid molecule of the invention, such as an siNA molecule, where one strand comprises nucleotide sequence that is referred to as the sense region and the other strand comprises a nucleotide sequence that is referred to as the antisense region, wherein each strand is between 15 and 30 nucleotides in length, comprises between about 10% and about 100% (e.g., about 10%, 20%, 30%, 40%, 50%, 60%, 70%, 80%, 90%, or 100%) complementarity between the sense region and the antisense region of the double stranded nucleic acid molecule. In reference to the nucleic molecules of the present invention, the binding free energy for a nucleic acid molecule with its complementary sequence is sufficient to allow the relevant function of the nucleic acid to proceed, e.g., RNAi activity. Determination of binding free energies for nucleic acid molecules is well known in the art (see, e.g., Turner et al., 1987, CSH Symp. Quant. Biol. LII pp. 123-133; Frier et al., 1986, Proc. Nat. Acad. Sci. USA 83:9373-9377; Turner et al., 1987, J. Am. Chem. Soc. 109:3783-3785). A percent complementarity indicates the percentage of contiguous residues in a nucleic acid molecule that can form hydrogen bonds (e.g., Watson-Crick base pairing) with a second nucleic acid sequence (e.g., 5, 6, 7, 8, 9, or 10 nucleotides out of a total of 10 nucleotides in the first oligonucleotide being based paired to a second nucleic acid sequence having 10 nucleotides represents 50%, 60%, 70%, 80%, 90%, and 100% complementary respectively). In one embodiment, a siNA molecule of the invention has perfect complementarity between the sense strand or sense region and the antisense strand or antisense region of the siNA molecule. In one embodiment, a siNA molecule of the invention is perfectly complementary to a corresponding target nucleic acid molecule. “Perfectly complementary” means that all the contiguous residues of a nucleic acid sequence will hydrogen bond with the same number of contiguous residues in a second nucleic acid sequence. In one embodiment, a siNA molecule of the invention comprises about 15 to about 30 or more (e.g., about 15, 16, 17, 18, 19, 20, 21, 22, 23, 24, 25, 26, 27, 28, 29, or 30 or more) nucleotides that are complementary to one or more target nucleic acid molecules or a portion thereof. In one embodiment, a siNA molecule of the invention has partial complementarity (i.e., less than 100% complementarity) between the sense strand or sense region and the antisense strand or antisense region of the siNA molecule or between the antisense strand or antisense region of the siNA molecule and a corresponding target nucleic acid molecule. For example, partial complementarity can include various mismatches or non-based paired nucleotides (e.g., 1, 2, 3, 4, 5 or more mismatches or non-based paired nucleotides) within the siNA structure which can result in bulges, loops, or overhangs that result between the between the sense strand or sense region and the antisense strand or antisense region of the siNA molecule or between the antisense strand or antisense region of the siNA molecule and a corresponding target nucleic acid molecule.

[0249] In one embodiment, a double stranded nucleic acid molecule of the invention, such as siNA molecule, has perfect complementarity between the sense strand or sense region and the antisense strand or antisense region of the nucleic acid molecule. In one embodiment, double stranded nucleic acid molecule of the invention, such as siNA molecule, is perfectly complementary to a corresponding target nucleic acid molecule.

[0250] In one embodiment, double stranded nucleic acid molecule of the invention, such as siNA molecule, has partial complementarity (i.e., less than 100% complementarity) between the sense strand or sense region and the antisense strand or antisense region of the double stranded nucleic acid molecule or between the antisense strand or antisense region of the nucleic acid molecule and a corresponding target nucleic acid molecule. For example, partial complementarity can include various mismatches or non-base paired nucleotides (e.g., 1, 2, 3, 4, 5 or more mismatches or non-based paired nucleotides, such as nucleotide bulges) within the double stranded nucleic acid molecule, structure which can result in bulges, loops, or overhangs that result between the sense strand or sense region and the antisense strand or antisense region of the double stranded nucleic acid molecule or between the antisense strand or antisense region of the double stranded nucleic acid molecule and a corresponding target nucleic acid molecule.

[0251] In one embodiment, a double stranded nucleic acid molecule of the invention is a microRNA (miRNA). By “mircoRNA” or “miRNA” is meant, a small double stranded RNA that regulates the expression of target messenger RNAs either by mRNA cleavage, translational repression/inhibition or heterochromatic silencing (see for example Ambros, 2004, Nature, 431, 350-355; Bartel, 2004, Cell, 116, 281-297; Cullen, 2004, Virus Research., 102, 3-9; He et al., 2004, Nat. Rev. Genet., 5, 522-531; and Ying et al., 2004, Gene, 342, 25-28). In one embodiment, the microRNA of the invention, has partial complementarity (i.e., less than 100% complementarity) between the sense strand or sense region and the antisense strand or antisense region of the miRNA molecule or between the antisense strand or antisense region of the miRNA and a corresponding target nucleic acid molecule. For example, partial complementarity can include various mismatches or non-base paired nucleotides (e.g., 1, 2, 3, 4, 5 or more mismatches or non-based paired nucleotides, such as nucleotide bulges) within the double stranded nucleic acid molecule, structure which can result in bulges, loops, or overhangs that result between the sense strand or sense region and the antisense strand or antisense region of the miRNA or between the antisense strand or antisense region of the miRNA and a corresponding target nucleic acid molecule.

[0252] In one embodiment, siNA molecules of the invention that down regulate or reduce target gene expression are used for preventing or treating diseases, disorders, conditions, or traits in a subject or organism as described herein or otherwise known in the art.

[0253] By “proliferative disease” or “cancer” as used herein is meant, any disease, condition, trait, genotype or phenotype characterized by unregulated cell growth or replication as is known in the art; including leukemias, for example, acute myelogenous leukemia (AML), chronic myelogenous leukemia (CML), acute lymphocytic leukemia (ALL), and chronic lymphocytic leukemia, AIDS related cancers such as Kaposi's sarcoma; breast cancers; bone cancers such as Osteosarcoma, Chondrosarcomas, Ewing's sarcoma, Fibrosarcomas, Giant cell tumors, Adamantinomas, and Chordomas; Brain cancers such as Meningiomas, Glioblastomas, Lower-Grade Astrocytomas, Oligodendrocytomas, Pituitary Tumors, Schwannomas, and Metastatic brain cancers; cancers of the head and neck including various lymphomas such as mantle cell lymphoma, non-Hodgkins lymphoma, adenoma, squamous cell carcinoma, laryngeal carcinoma, gallbladder and bile duct cancers, cancers of the retina such as retinoblastoma, cancers of the esophagus, gastric cancers, multiple myeloma, ovarian cancer, uterine cancer, thyroid cancer, testicular cancer, endometrial cancer, melanoma, colorectal cancer, lung cancer, bladder cancer, prostate cancer, lung cancer (including non-small cell lung carcinoma), pancreatic cancer, sarcomas, Wilms' tumor, cervical cancer, head and neck cancer, skin cancers, nasopharyngeal carcinoma, liposarcoma, epithelial carcinoma, renal cell carcinoma, gallbladder adeno carcinoma, parotid adenocarcinoma, endometrial sarcoma, multidrug resistant cancers; and proliferative diseases and conditions, such as neovascularization associated with tumor angiogenesis, and ocular diseases such as macular degeneration (e.g., wet/dry AMD), corneal neovascularization, diabetic retinopathy, neovascular glaucoma, myopic degeneration and other proliferative diseases and conditions such as restenosis and polycystic kidney disease, and any other cancer or proliferative disease, condition, trait, genotype or phenotype that can respond to the modulation of disease related gene expression in a cell or tissue, alone or in combination with other therapies.

[0254] By “ocular disease” as used herein is meant, any disease, condition, trait, genotype or phenotype of the eye and related structures as is known in the art, such as Cystoid Macular Edema, Asteroid Hyalosis, Pathological Myopia and Posterior Staphyloma, Toxocariasis (Ocular Larva Migrans), Retinal Vein Occlusion, Posterior Vitreous Detachment, Tractional Retinal Tears, Epiretinal Membrane, Diabetic Retinopathy, Lattice Degeneration, Retinal Vein Occlusion, Retinal Artery Occlusion, Macular Degeneration (e.g., age related macular degeneration such as wet AMD or dry AMD), Toxoplasmosis, Choroidal Melanoma, Acquired Retinoschisis, Hollenhorst Plaque, Idiopathic Central Serous Chorioretinopathy, Macular Hole, Presumed Ocular Histoplasmosis Syndrome, Retinal Macroaneursym, Retinitis Pigmentosa, Retinal Detachment, Hypertensive Retinopathy, Retinal Pigment Epithelium (RPE) Detachment, Papillophlebitis, Ocular Ischemic Syndrome, Coats' Disease, Leber's Miliary Aneurysm, Conjunctival Neoplasms, Allergic Conjunctivitis, Vernal Conjunctivitis, Acute Bacterial Conjunctivitis, Allergic Conjunctivitis & Vernal Keratoconjunctivitis, Viral Conjunctivitis, Bacterial Conjunctivitis, Chlamydial & Gonococcal Conjunctivitis, Conjunctival Laceration, Episcleritis, Scleritis, Pingueculitis, Pterygium, Superior Limbic Keratoconjunctivitis (SLK of Theodore), Toxic Conjunctivitis, Conjunctivitis with Pseudomembrane, Giant Papillary Conjunctivitis, Terrien's Marginal Degeneration, Acanthamoeba Keratitis, Fungal Keratitis, Filamentary Keratitis, Bacterial Keratitis, Keratitis Sicca/Dry Eye Syndrome, Bacterial Keratitis, Herpes Simplex Keratitis, Sterile Corneal Infiltrates, Phlyctenulosis, Corneal Abrasion & Recurrent Corneal Erosion, Corneal Foreign Body, Chemical Burs, Epithelial Basement Membrane Dystrophy (EBMD), Thygeson's Superficial Punctate Keratopathy, Corneal Laceration, Salzmann's Nodular Degeneration, Fuchs' Endothelial Dystrophy, Crystalline Lens Subluxation, Ciliary-Block Glaucoma, Primary Open-Angle Glaucoma, Pigment Dispersion Syndrome and Pigmentary Glaucoma, Pseudoexfoliation Syndrom and Pseudoexfoliative Glaucoma, Anterior Uveitis, Primary Open Angle Glaucoma, Uveitic Glaucoma & Glaucomatocyclitic Crisis, Pigment Dispersion Syndrome & Pigmentary Glaucoma, Acute Angle Closure Glaucoma, Anterior Uveitis, Hyphema, Angle Recession Glaucoma, Lens Induced Glaucoma, Pseudoexfoliation Syndrome and Pseudoexfoliative Glaucoma, Axenfeld-Rieger Syndrome, Neovascular Glaucoma, Pars Planitis, Choroidal Rupture, Duane's Retraction Syndrome, Toxic/Nutritional Optic Neuropathy, Aberrant Regeneration of Cranial Nerve III, Intracranial Mass Lesions, Carotid-Cavernous Sinus Fistula, Anterior Ischemic Optic Neuropathy, Optic Disc Edema & Papilledema, Cranial Nerve III Palsy, Cranial Nerve IV Palsy, Cranial Nerve VI Palsy, Cranial Nerve VII (Facial Nerve) Palsy, Horner's Syndrome, Internuclear Ophthalmoplegia, Optic Nerve Head Hypoplasia, Optic Pit, Tonic Pupil, Optic Nerve Head Drusen, Demyelinating Optic Neuropathy (Optic Neuritis, Retrobulbar Optic Neuritis), Amaurosis Fugax and Transient Ischemic Attack, Pseudotumor Cerebri, Pituitary Adenoma, Molluscum Contagiosum, Canaliculitis, Verruca and Papilloma, Pediculosis and Pthiriasis, Blepharitis, Hordeolum, Preseptal Cellulitis, Chalazion, Basal Cell Carcinoma, Herpes Zoster Ophthalmicus, Pediculosis & Phthiriasis, Blow-out Fracture, Chronic Epiphora, Dacryocystitis, Herpes Simplex Blepharitis, Orbital Cellulitis, Senile Entropion, and Squamous Cell Carcinoma.

[0255] In one embodiment of the present invention, each sequence of a siNA molecule of the invention is independently about 15 to about 30 nucleotides in length, in specific embodiments about 15, 16, 17, 18, 19, 20, 21, 22, 23, 24, 25, 26, 27, 28, 29, or 30 nucleotides in length. In another embodiment, the siNA duplexes of the invention independently comprise about 15 to about 30 base pairs (e.g., about 15, 16, 17, 18, 19, 20, 21, 22, 23, 24, 25, 26, 27, 28, 29, or 30). In another embodiment, one or more strands of the siNA molecule of the invention independently comprises about 15 to about 30 nucleotides (e.g., about 15, 16, 17, 18, 19, 20, 21, 22, 23, 24, 25, 26, 27, 28, 29, or 30) that are complementary to a target nucleic acid molecule. In yet another embodiment, siNA molecules of the invention comprising hairpin or circular structures are about 35 to about 55 (e.g., about 35, 40, 45, 50 or 55) nucleotides in length, or about 38 to about 44 (e.g., about 38, 39, 40, 41, 42, 43, or 44) nucleotides in length and comprising about 15 to about 25 (e.g., about 15, 16, 17, 18, 19, 20, 21, 22, 23, 24, or 25) base pairs. Exemplary siNA molecules of the invention are shown in Table II and/or FIGS. 4-5.

[0256] As used herein “cell” is used in its usual biological sense, and does not refer to an entire multicellular organism, e.g., specifically does not refer to a human. The cell can be present in an organism, e.g., birds, plants and mammals such as humans, cows, sheep, apes, monkeys, swine, dogs, and cats. The cell can be prokaryotic (e.g., bacterial cell) or eukaryotic (e.g., mammalian or plant cell). The cell can be of somatic or germ line origin, totipotent or pluripotent, dividing or non-dividing. The cell can also be derived from or can comprise a gamete or embryo, a stem cell, or a fully differentiated cell.

[0257] The siNA molecules of the invention are added directly, or can be complexed with cationic lipids, packaged within liposomes, or otherwise delivered to target cells or tissues. The nucleic acid or nucleic acid complexes can be locally administered to relevant tissues ex vivo, or in vivo through local delivery to the lung, with or without their incorporation in biopolymers. In particular embodiments, the nucleic acid molecules of the invention comprise sequences shown in Tables II-III and/or FIGS. 4-5. Examples of such nucleic acid molecules consist essentially of sequences defined in these tables and figures. Furthermore, the chemically modified constructs described in Table IV can be applied to any siNA sequence of the invention.

[0258] In another aspect, the invention provides mammalian cells containing one or more siNA molecules of this invention. The one or more siNA molecules can independently be targeted to the same or different sites.

[0259] By “RNA” is meant a molecule comprising at least one ribonucleotide residue. By “ribonucleotide” is meant a nucleotide with a hydroxyl group at the 2′ position of a β-D-ribofuranose moiety. The terms include double-stranded RNA, single-stranded RNA, isolated RNA such as partially purified RNA, essentially pure RNA, synthetic RNA, recombinantly produced RNA, as well as altered RNA that differs from naturally occurring RNA by the addition, deletion, substitution and/or alteration of one or more nucleotides. Such alterations can include addition of non-nucleotide material, such as to the end(s) of the siNA or internally, for example at one or more nucleotides of the RNA. Nucleotides in the RNA molecules of the instant invention can also comprise non-standard nucleotides, such as non-naturally occurring nucleotides or chemically synthesized nucleotides or deoxynucleotides. These altered RNAs can be referred to as analogs or analogs of naturally-occurring RNA.

[0260] By “subject” is meant an organism, which is a donor or recipient of explanted cells or the cells themselves. “Subject” also refers to an organism to which the nucleic acid molecules of the invention can be administered. A subject can be a mammal or mammalian cells, including a human or human cells.

[0261] By “chemical modification” as used herein is meant any modification of chemical structure of the nucleotides that differs from nucleotides of native siRNA or RNA. The term “chemical modification” encompasses the addition, substitution, or modification of native siRNA or RNA nucleosides and nucleotides with modified nucleosides and modified nucleotides as described herein or as is otherwise known in the art. Non-limiting examples of such chemical modifications include without limitation phosphorothioate internucleotide linkages, 2′-deoxyribonucleotides, 2′-O-methyl ribonucleotides, 2′-deoxy-2′-fluoro ribonucleotides, 4′-thio ribonucleotides, 2′-O-trifluoromethyl nucleotides, 2′-O-ethyl-trifluoromethoxy nucleotides, 2′-O-difluoromethoxy-ethoxy nucleotides (see for example U.S. Ser. No. 10/981,966 filed Nov. 5, 2004, incorporated by reference herein), “universal base” nucleotides, “acyclic” nucleotides, 5-C-methyl nucleotides, terminal glyceryl and/or inverted deoxy abasic residue incorporation, or a modification having any of Formulae I-VII herein.

[0262] The term “phosphorothioate” as used herein refers to an internucleotide linkage having Formula I, wherein Z and/or W comprise a sulfur atom. Hence, the term phosphorothioate refers to both phosphorothioate and phosphorodithioate internucleotide linkages.

[0263] The term “phosphonoacetate” as used herein refers to an internucleotide linkage having Formula I, wherein Z and/or W comprise an acetyl or protected acetyl group.

[0264] The term “thiophosphonoacetate” as used herein refers to an internucleotide linkage having Formula I, wherein Z comprises an acetyl or protected acetyl group and W comprises a sulfur atom or alternately W comprises an acetyl or protected acetyl group and Z comprises a sulfur atom.

[0265] The term “universal base” as used herein refers to nucleotide base analogs that form base pairs with each of the natural DNA/RNA bases with little discrimination between them. Non-limiting examples of universal bases include C-phenyl, C-naphthyl and other aromatic derivatives, inosine, azole carboxamides, and nitroazole derivatives such as 3-nitropyrrole, 4-nitroindole, 5-nitroindole, and 6-nitroindole as known in the art (see for example Loakes, 2001, Nucleic Acids Research, 29, 2437-2447).

[0266] The term “acyclic nucleotide” as used herein refers to any nucleotide having an acyclic ribose sugar, for example where any of the ribose carbons (C1, C2, C3, C4, or C5), are independently or in combination absent from the nucleotide.

[0267] The nucleic acid molecules of the instant invention, individually, or in combination or in conjunction with other drugs, can be used to for preventing or treating diseases, disorders, conditions, and traits described herein or otherwise known in the art, in a subject or organism.

[0268] In one embodiment, the siNA molecules of the invention can be administered to a subject or can be administered to other appropriate cells evident to those skilled in the art, individually or in combination with one or more drugs under conditions suitable for the treatment.

[0269] In a further embodiment, the siNA molecules can be used in combination with other known treatments to prevent or treat in a subject or organism. For example, the described molecules could be used in combination with one or more known compounds, treatments, or procedures to prevent or treat diseases, disorders, conditions, and traits described herein in a subject or organism as are known in the art.

[0270] In one embodiment, the invention features an expression vector comprising a nucleic acid sequence encoding at least one siNA molecule of the invention, in a manner which allows expression of the siNA molecule. For example, the vector can contain sequence(s) encoding both strands of a siNA molecule comprising a duplex. The vector can also contain sequence(s) encoding a single nucleic acid molecule that is self-complementary and thus forms a siNA molecule. Non-limiting examples of such expression vectors are described in Paul et al., 2002, Nature Biotechnology, 19, 505; Miyagishi and Taira, 2002, Nature Biotechnology, 19, 497; Lee et al., 2002, Nature Biotechnology, 19, 500; and Novina et al., 2002, Nature Medicine, advance online publication doi:10.1038/nm725.

[0271] In another embodiment, the invention features a mammalian cell, for example, a human cell, including an expression vector of the invention.

[0272] In yet another embodiment, the expression vector of the invention comprises a sequence for a siNA molecule having complementarity to a RNA molecule referred to by a Genbank Accession numbers, for example Genbank Accession Nos. shown in Table I herein or in U.S. Ser. No. 10/923,536 and U.S. Ser. No. 10/923,536, both incorporated by reference herein.

[0273] In one embodiment, an expression vector of the invention comprises a nucleic acid sequence encoding two or more siNA molecules, which can be the same or different.

[0274] In another aspect of the invention, siNA molecules that interact with target RNA molecules and down-regulate gene encoding target RNA molecules (for example target RNA molecules referred to by Genbank Accession numbers herein) are expressed from transcription units inserted into DNA or RNA vectors. The recombinant vectors can be DNA plasmids or viral vectors. siNA expressing viral vectors can be constructed based on, but not limited to, adeno-associated virus, retrovirus, adenovirus, or alphavirus. The recombinant vectors capable of expressing the siNA molecules can be delivered as described herein, and persist in target cells. Alternatively, viral vectors can be used that provide for transient expression of siNA molecules. Such vectors can be repeatedly administered as necessary. Once expressed, the siNA molecules bind and down-regulate gene function or expression via RNA interference (RNAi). Delivery of siNA expressing vectors can be systemic, such as by intravenous or intramuscular administration, by administration to target cells ex-planted from a subject followed by reintroduction into the subject, or by any other means that would allow for introduction into the desired target cell.

[0275] By “vectors” is meant any nucleic acid- and/or viral-based technique used to deliver a desired nucleic acid.

[0276] Other features and advantages of the invention will be apparent from the following description of the preferred embodiments thereof, and from the claims.

### BRIEF DESCRIPTION OF THE DRAWINGS

[0277] FIG. 1 shows a non-limiting example of a scheme for the synthesis of siNA molecules. The complementary siNA sequence strands, strand 1 and strand 2, are synthesized in tandem and are connected by a cleavable linkage, such as a nucleotide succinate or abasic succinate, which can be the same or different from the cleavable linker used for solid phase synthesis on a solid support. The synthesis can be either solid phase or solution phase, in the example shown, the synthesis is a solid phase synthesis. The synthesis is performed such that a protecting group, such as a dimethoxytrityl group, remains intact on the terminal nucleotide of the tandem oligonucleotide. Upon cleavage and deprotection of the oligonucleotide, the two siNA strands spontaneously hybridize to form a siNA duplex, which allows the purification of the duplex by utilizing the properties of the terminal protecting group, for example by applying a trityl on purification method wherein only duplexes/oligonucleotides with the terminal protecting group are isolated.

[0278] FIG. 2 shows a MALDI-TOF mass spectrum of a purified siNA duplex synthesized by a method of the invention. The two peaks shown correspond to the predicted mass of the separate siNA sequence strands. This result demonstrates that the siNA duplex generated from tandem synthesis can be purified as a single entity using a simple trityl-on purification methodology.

[0279] FIG. 3 shows a non-limiting proposed mechanistic representation of target RNA degradation involved in RNAi. Double-stranded RNA (dsRNA), which is generated by RNA-dependent RNA polymerase (RdRP) from foreign single-stranded RNA, for example viral, transposon, or other exogenous RNA, activates the DICER enzyme that in turn generates siNA duplexes. Alternately, synthetic or expressed siNA can be introduced directly into a cell by appropriate means. An active siNA complex forms which recognizes a target RNA, resulting in degradation of the target RNA by the RISC endonuclease complex or in the synthesis of additional RNA by RNA-dependent RNA polymerase (RdRP), which can activate DICER and result in additional siNA molecules, thereby amplifying the RNAi response.

[0280] FIG. 4A-F shows non-limiting examples of chemically-modified siNA constructs of the present invention. In the figure, N stands for any nucleotide (adenosine, guanosine, cytosine, uridine, or optionally thymidine, for example thymidine can be substituted in the overhanging regions designated by parenthesis (N N). Various modifications are shown for the sense and antisense strands of the siNA constructs.

[0281] FIG. 4A: The sense strand comprises 21 nucleotides wherein the two terminal 3′-nucleotides are optionally base paired and wherein all nucleotides present are ribonucleotides except for (N N) nucleotides, which can comprise ribonucleotides, deoxynucleotides, universal bases, or other chemical modifications described herein. The antisense strand comprises 21 nucleotides, optionally having a 3′-terminal glyceryl moiety wherein the two terminal 3′-nucleotides are optionally complementary to the target RNA sequence, and wherein all nucleotides present are ribonucleotides except for (N N) nucleotides, which can comprise ribonucleotides, deoxynucleotides, universal bases, or other chemical modifications described herein. A modified internucleotide linkage, such as a phosphorothioate, phosphorodithioate or other modified internucleotide linkage as described herein, shown as “s”, optionally connects the (N N) nucleotides in the antisense strand.

[0282] FIG. 4B: The sense strand comprises 21 nucleotides wherein the two terminal 3′-nucleotides are optionally base paired and wherein all pyrimidine nucleotides that may be present are 2′deoxy-2′-fluoro modified nucleotides and all purine nucleotides that may be present are 2′-O-methyl modified nucleotides except for (N N) nucleotides, which can comprise ribonucleotides, deoxynucleotides, universal bases, or other chemical modifications described herein. The antisense strand comprises 21 nucleotides, optionally having a 3′-terminal glyceryl moiety and wherein the two terminal 3′-nucleotides are optionally complementary to the target RNA sequence, and wherein all pyrimidine nucleotides that may be present are 2′-deoxy-2′-fluoro modified nucleotides and all purine nucleotides that may be present are 2′-O-methyl modified nucleotides except for (N N) nucleotides, which can comprise ribonucleotides, deoxynucleotides, universal bases, or other chemical modifications described herein. A modified internucleotide linkage, such as a phosphorothioate, phosphorodithioate or other modified internucleotide linkage as described herein, shown as “s”, optionally connects the (N N) nucleotides in the sense and antisense strand.

[0283] FIG. 4C: The sense strand comprises 21 nucleotides having 5′- and 3′-terminal cap moieties wherein the two terminal 3′-nucleotides are optionally base paired and wherein all pyrimidine nucleotides that may be present are 2′-O-methyl or 2′-deoxy-2′-fluoro modified nucleotides except for (N N) nucleotides, which can comprise ribonucleotides, deoxynucleotides, universal bases, or other chemical modifications described herein. The antisense strand comprises 21 nucleotides, optionally having a 3′-terminal glyceryl moiety and wherein the two terminal 3′-nucleotides are optionally complementary to the target RNA sequence, and wherein all pyrimidine nucleotides that may be present are 2′-deoxy-2′-fluoro modified nucleotides except for (N N) nucleotides, which can comprise ribonucleotides, deoxynucleotides, universal bases, or other chemical modifications described herein. A modified internucleotide linkage, such as a phosphorothioate, phosphorodithioate or other modified internucleotide linkage as described herein, shown as “s”, optionally connects the (N N) nucleotides in the antisense strand.

[0284] FIG. 4D: The sense strand comprises 21 nucleotides having 5′- and 3′-terminal cap moieties wherein the two terminal 3′-nucleotides are optionally base paired and wherein all pyrimidine nucleotides that may be present are 2′-deoxy-2′-fluoro modified nucleotides except for (N N) nucleotides, which can comprise ribonucleotides, deoxynucleotides, universal bases, or other chemical modifications described herein and wherein and all purine nucleotides that may be present are 2′-deoxy nucleotides. The antisense strand comprises 21 nucleotides, optionally having a 3′-terminal glyceryl moiety and wherein the two terminal 3′-nucleotides are optionally complementary to the target RNA sequence, wherein all pyrimidine nucleotides that may be present are 2′-deoxy-2′-fluoro modified nucleotides and all purine nucleotides that may be present are 2′-O-methyl modified nucleotides except for (N N) nucleotides, which can comprise ribonucleotides, deoxynucleotides, universal bases, or other chemical modifications described herein. A modified internucleotide linkage, such as a phosphorothioate, phosphorodithioate or other modified internucleotide linkage as described herein, shown as “s”, optionally connects the (N N) nucleotides in the antisense strand.

[0285] FIG. 4E: The sense strand comprises 21 nucleotides having 5′- and 3′-terminal cap moieties wherein the two terminal 3′-nucleotides are optionally base paired and wherein all pyrimidine nucleotides that may be present are 2′-deoxy-2′-fluoro modified nucleotides except for (N N) nucleotides, which can comprise ribonucleotides, deoxynucleotides, universal bases, or other chemical modifications described herein. The antisense strand comprises 21 nucleotides, optionally having a 3′-terminal glyceryl moiety and wherein the two terminal 3′-nucleotides are optionally complementary to the target RNA sequence, and wherein all pyrimidine nucleotides that may be present are 2′-deoxy-2′-fluoro modified nucleotides and all purine nucleotides that may be present are 2′-O-methyl modified nucleotides except for (N N) nucleotides, which can comprise ribonucleotides, deoxynucleotides, universal bases, or other chemical modifications described herein. A modified internucleotide linkage, such as a phosphorothioate, phosphorodithioate or other modified internucleotide linkage as described herein, shown as “s”, optionally connects the (N N) nucleotides in the antisense strand.

[0286] FIG. 4F: The sense strand comprises 21 nucleotides having 5′- and 3′-terminal cap moieties wherein the two terminal 3′-nucleotides are optionally base paired and wherein all pyrimidine nucleotides that may be present are 2′-deoxy-2′-fluoro modified nucleotides except for (N N) nucleotides, which can comprise ribonucleotides, deoxynucleotides, universal bases, or other chemical modifications described herein and wherein and all purine nucleotides that may be present are 2′-deoxy nucleotides. The antisense strand comprises 21 nucleotides, optionally having a 3′-terminal glyceryl moiety and wherein the two terminal 3′-nucleotides are optionally complementary to the target RNA sequence, and having one 3′-terminal phosphorothioate internucleotide linkage and wherein all pyrimidine nucleotides that may be present are 2′-deoxy-2′-fluoro modified nucleotides and all purine nucleotides that may be present are 2′-deoxy nucleotides except for (N N) nucleotides, which can comprise ribonucleotides, deoxynucleotides, universal bases, or other chemical modifications described herein. A modified internucleotide linkage, such as a phosphorothioate, phosphorodithioate or other modified internucleotide linkage as described herein, shown as “s”, optionally connects the (N N) nucleotides in the antisense strand. The antisense strand of constructs A-F comprise sequence complementary to any target nucleic acid sequence of the invention. Furthermore, when a glyceryl moiety (L) is present at the 3′-end of the antisense strand for any construct shown in FIG. 4 A-F, the modified internucleotide linkage is optional.

[0287] FIG. 5A-F shows non-limiting examples of specific chemically-modified siNA sequences of the invention. A-F applies the chemical modifications described in FIG. 4A-F to an exemplary HDAC 11 siNA sequence. Such chemical modifications can be applied to any target polynucleotide sequence.

[0288] FIG. 6A-B shows non-limiting examples of different siNA constructs of the invention.

[0289] The examples shown in FIG. 6A (constructs 1, 2, and 3) have 19 representative base pairs; however, different embodiments of the invention include any number of base pairs described herein. Bracketed regions represent nucleotide overhangs, for example, comprising about 1, 2, 3, or 4 nucleotides in length, preferably about 2 nucleotides. Constructs 1 and 2 can be used independently for RNAi activity. Construct 2 can comprise a polynucleotide or non-nucleotide linker, which can optionally be designed as a biodegradable linker. In one embodiment, the loop structure shown in construct 2 can comprise a biodegradable linker that results in the formation of construct 1 in vivo and/or in vitro. In another example, construct 3 can be used to generate construct 2 under the same principle wherein a linker is used to generate the active siNA construct 2 in vivo and/or in vitro, which can optionally utilize another biodegradable linker to generate the active siNA construct 1 in vivo and/or in vitro. As such, the stability and/or activity of the siNA constructs can be modulated based on the design of the siNA construct for use in vivo or in vitro and/or in vitro.

[0290] The examples shown in FIG. 6B represent different variations of double stranded nucleic acid molecule of the invention, such as microRNA, that can include overhangs, bulges, loops, and stem-loops resulting from partial complementarity. Such motifs having bulges, loops, and stem-loops are generally characteristics of miRNA. The bulges, loops, and stem-loops can result from any degree of partial complementarity, such as mismatches or bulges of about 1, 2, 3, 4, 5, 6, 7, 8, 9, 10 or more nucleotides in one or both strands of the double stranded nucleic acid molecule of the invention.

[0291] FIG. 7A-C is a diagrammatic representation of a scheme utilized in generating an expression cassette to generate siNA hairpin constructs.

[0292] FIG. 7A: A DNA oligomer is synthesized with a 5′-restriction site (R1) sequence followed by a region having sequence identical (sense region of siNA) to a predetermined target sequence, wherein the sense region comprises, for example, about 19, 20, 21, or 22 nucleotides (N) in length, which is followed by a loop sequence of defined sequence (X), comprising, for example, about 3 to about 10 nucleotides.

[0293] FIG. 7B: The synthetic construct is then extended by DNA polymerase to generate a hairpin structure having self-complementary sequence that will result in a siNA transcript having specificity for a target sequence and having self-complementary sense and antisense regions.

[0294] FIG. 7C: The construct is heated (for example to about 95° C.) to linearize the sequence, thus allowing extension of a complementary second DNA strand using a primer to the 3′-restriction sequence of the first strand. The double-stranded DNA is then inserted into an appropriate vector for expression in cells. The construct can be designed such that a 3′-terminal nucleotide overhang results from the transcription, for example, by engineering restriction sites and/or utilizing a poly-U termination region as described in Paul et al., 2002, Nature Biotechnology, 29, 505-508.

[0295] FIG. 8A-C is a diagrammatic representation of a scheme utilized in generating an expression cassette to generate double-stranded siNA constructs.

[0296] FIG. 8A: A DNA oligomer is synthesized with a 5′-restriction (R1) site sequence followed by a region having sequence identical (sense region of siNA) to a predetermined target sequence, wherein the sense region comprises, for example, about 19, 20, 21, or 22 nucleotides (N) in length, and which is followed by a 3′-restriction site (R2) which is adjacent to a loop sequence of defined sequence (X).

[0297] FIG. 8B: The synthetic construct is then extended by DNA polymerase to generate a hairpin structure having self-complementary sequence.

[0298] FIG. 8C: The construct is processed by restriction enzymes specific to R1 and R2 to generate a double-stranded DNA which is then inserted into an appropriate vector for expression in cells. The transcription cassette is designed such that a U6 promoter region flanks each side of the dsDNA which generates the separate sense and antisense strands of the siNA. Poly T termination sequences can be added to the constructs to generate U overhangs in the resulting transcript.

[0299] FIG. 9A-E is a diagrammatic representation of a method used to determine target sites for siNA mediated RNAi within a particular target nucleic acid sequence, such as messenger RNA.

[0300] FIG. 9A: A pool of siNA oligonucleotides are synthesized wherein the antisense region of the siNA constructs has complementarity to target sites across the target nucleic acid sequence, and wherein the sense region comprises sequence complementary to the antisense region of the siNA.

[0301] FIGS. 9B&C: (FIG. 9B) The sequences are pooled and are inserted into vectors such that (FIG. 9C) transfection of a vector into cells results in the expression of the siNA.

[0302] FIG. 9D: Cells are sorted based on phenotypic change that is associated with modulation of the target nucleic acid sequence.

[0303] FIG. 9E: The siNA is isolated from the sorted cells and is sequenced to identify efficacious target sites within the target nucleic acid sequence.

[0304] FIG. 10 shows non-limiting examples of different stabilization chemistries (1-10) that can be used, for example, to stabilize the 3′-end of siNA sequences of the invention, including (1) [3-3′]-inverted deoxyribose; (2) deoxyribonucleotide; (3) [5′-3′]-3′ deoxyribonucleotide; (4) [5′-3′]-ribonucleotide; (5) [5′-3′]-3′-O-methyl ribonucleotide; (6) 3′-glyceryl; (7) [3′-5′]-3′-deoxyribonucleotide; (8) [3′-3′]-deoxyribonucleotide; (9) [5′-2′]-deoxyribonucleotide; and (10) [5-3′]-dideoxyribonucleotide. In addition to modified and unmodified backbone chemistries indicated in the figure, these chemistries can be combined with different backbone modifications as described herein, for example, backbone modifications having Formula I. In addition, the 2′-deoxy nucleotide shown 5′ to the terminal modifications shown can be another modified or unmodified nucleotide or non-nucleotide described herein, for example modifications having any of Formulae I-VII or any combination thereof.

[0305] FIG. 11 shows a non-limiting example of a strategy used to identify chemically modified siNA constructs of the invention that are nuclease resistance while preserving the ability to mediate RNAi activity. Chemical modifications are introduced into the siNA construct based on educated design parameters (e.g. introducing 2′-mofications, base modifications, backbone modifications, terminal cap modifications etc). The modified construct in tested in an appropriate system (e.g. human serum for nuclease resistance, shown, or an animal model for PK/delivery parameters). In parallel, the siNA construct is tested for RNAi activity, for example in a cell culture system such as a luciferase reporter assay). Lead siNA constructs are then identified which possess a particular characteristic while maintaining RNAi activity, and can be further modified and assayed once again. This same approach can be used to identify siNA-conjugate molecules with improved pharmacokinetic profiles, delivery, and RNAi activity.

[0306] FIG. 12 shows non-limiting examples of phosphorylated siNA molecules of the invention, including linear and duplex constructs and asymmetric derivatives thereof.

[0307] FIG. 13 shows non-limiting examples of chemically modified terminal phosphate groups of the invention.

[0308] FIG. 14A shows a non-limiting example of methodology used to design self complementary DFO constructs utilizing palindrome and/or repeat nucleic acid sequences that are identified in a target nucleic acid sequence. (i) A palindrome or repeat sequence is identified in a nucleic acid target sequence. (ii) A sequence is designed that is complementary to the target nucleic acid sequence and the palindrome sequence. (iii) An inverse repeat sequence of the non-palindrome/repeat portion of the complementary sequence is appended to the 3′-end of the complementary sequence to generate a self complementary DFO molecule comprising sequence complementary to the nucleic acid target. (iv) The DFO molecule can self-assemble to form a double stranded oligonucleotide. FIG. 14B shows a non-limiting representative example of a duplex forming oligonucleotide sequence. FIG. 14C shows a non-limiting example of the self assembly schematic of a representative duplex forming oligonucleotide sequence. FIG. 14D shows a non-limiting example of the self assembly schematic of a representative duplex forming oligonucleotide sequence followed by interaction with a target nucleic acid sequence resulting in modulation of gene expression.

[0309] FIG. 15 shows a non-limiting example of the design of self complementary DFO constructs utilizing palindrome and/or repeat nucleic acid sequences that are incorporated into the DFO constructs that have sequence complementary to any target nucleic acid sequence of interest. Incorporation of these palindrome/repeat sequences allow the design of DFO constructs that form duplexes in which each strand is capable of mediating modulation of target gene expression, for example by RNAi. First, the target sequence is identified. A complementary sequence is then generated in which nucleotide or non-nucleotide modifications (shown as X or Y) are introduced into the complementary sequence that generate an artificial palindrome (shown as XYXYXY in the Figure). An inverse repeat of the non-palindrome/repeat complementary sequence is appended to the 3′-end of the complementary sequence to generate a self complementary DFO comprising sequence complementary to the nucleic acid target. The DFO can self-assemble to form a double stranded oligonucleotide.

[0310] FIG. 16 shows non-limiting examples of multifunctional siNA molecules of the invention comprising two separate polynucleotide sequences that are each capable of mediating RNAi directed cleavage of differing target nucleic acid sequences. FIG. 16A shows a non-limiting example of a multifunctional siNA molecule having a first region that is complementary to a first target nucleic acid sequence (complementary region 1) and a second region that is complementary to a second target nucleic acid sequence (complementary region 2), wherein the first and second complementary regions are situated at the 3′-ends of each polynucleotide sequence in the multifunctional siNA. The dashed portions of each polynucleotide sequence of the multifunctional siNA construct have complementarity with regard to corresponding portions of the siNA duplex, but do not have complementarity to the target nucleic acid sequences. FIG. 16B shows a non-limiting example of a multifunctional siNA molecule having a first region that is complementary to a first target nucleic acid sequence (complementary region 1) and a second region that is complementary to a second target nucleic acid sequence (complementary region 2), wherein the first and second complementary regions are situated at the 5′-ends of each polynucleotide sequence in the multifunctional siNA. The dashed portions of each polynucleotide sequence of the multifunctional siNA construct have complementarity with regard to corresponding portions of the siNA duplex, but do not have complementarity to the target nucleic acid sequences.

[0311] FIG. 17 shows non-limiting examples of multifunctional siNA molecules of the invention comprising a single polynucleotide sequence comprising distinct regions that are each capable of mediating RNAi directed cleavage of differing target nucleic acid sequences. FIG. 17A shows a non-limiting example of a multifunctional siNA molecule having a first region that is complementary to a first target nucleic acid sequence (complementary region 1) and a second region that is complementary to a second target nucleic acid sequence (complementary region 2), wherein the second complementary region is situated at the 3′-end of the polynucleotide sequence in the multifunctional siNA. The dashed portions of each polynucleotide sequence of the multifunctional siNA construct have complementarity with regard to corresponding portions of the siNA duplex, but do not have complementarity to the target nucleic acid sequences. FIG. 17B shows a non-limiting example of a multifunctional siNA molecule having a first region that is complementary to a first target nucleic acid sequence (complementary region 1) and a second region that is complementary to a second target nucleic acid sequence (complementary region 2), wherein the first complementary region is situated at the 5′-end of the polynucleotide sequence in the multifunctional siNA. The dashed portions of each polynucleotide sequence of the multifunctional siNA construct have complementarity with regard to corresponding portions of the siNA duplex, but do not have complementarity to the target nucleic acid sequences. In one embodiment, these multifunctional siNA constructs are processed in vivo or in vitro to generate multifunctional siNA constructs as shown in FIG. 16.

[0312] FIG. 18 shows non-limiting examples of multifunctional siNA molecules of the invention comprising two separate polynucleotide sequences that are each capable of mediating RNAi directed cleavage of differing target nucleic acid sequences and wherein the multifunctional siNA construct further comprises a self complementary, palindrome, or repeat region, thus enabling shorter bifuctional siNA constructs that can mediate RNA interference against differing target nucleic acid sequences. FIG. 18A shows a non-limiting example of a multifunctional siNA molecule having a first region that is complementary to a first target nucleic acid sequence (complementary region 1) and a second region that is complementary to a second target nucleic acid sequence (complementary region 2), wherein the first and second complementary regions are situated at the 3′-ends of each polynucleotide sequence in the multifunctional siNA, and wherein the first and second complementary regions further comprise a self complementary, palindrome, or repeat region. The dashed portions of each polynucleotide sequence of the multifunctional siNA construct have complementarity with regard to corresponding portions of the siNA duplex, but do not have complementarity to the target nucleic acid sequences. FIG. 18B shows a non-limiting example of a multifunctional siNA molecule having a first region that is complementary to a first target nucleic acid sequence (complementary region 1) and a second region that is complementary to a second target nucleic acid sequence (complementary region 2), wherein the first and second complementary regions are situated at the 5′-ends of each polynucleotide sequence in the multifunctional siNA, and wherein the first and second complementary regions further comprise a self complementary, palindrome, or repeat region. The dashed portions of each polynucleotide sequence of the multifunctional siNA construct have complementarity with regard to corresponding portions of the siNA duplex, but do not have complementarity to the target nucleic acid sequences.

[0313] FIG. 19 shows non-limiting examples of multifunctional siNA molecules of the invention comprising a single polynucleotide sequence comprising distinct regions that are each capable of mediating RNAi directed cleavage of differing target nucleic acid sequences and wherein the multifunctional siNA construct further comprises a self complementary, palindrome, or repeat region, thus enabling shorter bifuctional siNA constructs that can mediate RNA interference against differing target nucleic acid sequences. FIG. 19A shows a non-limiting example of a multifunctional siNA molecule having a first region that is complementary to a first target nucleic acid sequence (complementary region 1) and a second region that is complementary to a second target nucleic acid sequence (complementary region 2), wherein the second complementary region is situated at the 3′-end of the polynucleotide sequence in the multifunctional siNA, and wherein the first and second complementary regions further comprise a self complementary, palindrome, or repeat region. The dashed portions of each polynucleotide sequence of the multifunctional siNA construct have complementarity with regard to corresponding portions of the siNA duplex, but do not have complementarity to the target nucleic acid sequences. FIG. 19B shows a non-limiting example of a multifunctional siNA molecule having a first region that is complementary to a first target nucleic acid sequence (complementary region 1) and a second region that is complementary to a second target nucleic acid sequence (complementary region 2), wherein the first complementary region is situated at the 5′-end of the polynucleotide sequence in the multifunctional siNA, and wherein the first and second complementary regions further comprise a self complementary, palindrome, or repeat region. The dashed portions of each polynucleotide sequence of the multifunctional siNA construct have complementarity with regard to corresponding portions of the siNA duplex, but do not have complementarity to the target nucleic acid sequences. In one embodiment, these multifunctional siNA constructs are processed in vivo or in vitro to generate multifunctional siNA constructs as shown in FIG. 18.

[0314] FIG. 20 shows a non-limiting example of how multifunctional siNA molecules of the invention can target two separate target nucleic acid molecules, such as separate RNA molecules encoding differing proteins, for example, a cytokine and its corresponding receptor, differing viral strains, a virus and a cellular protein involved in viral infection or replication, or differing proteins involved in a common or divergent biologic pathway that is implicated in the maintenance of progression of disease. Each strand of the multifunctional siNA construct comprises a region having complementarity to separate target nucleic acid molecules. The multifunctional siNA molecule is designed such that each strand of the siNA can be utilized by the RISC complex to initiate RNA interference mediated cleavage of its corresponding target. These design parameters can include destabilization of each end of the siNA construct (see for example Schwarz et al., 2003, Cell, 115, 199-208). Such destabilization can be accomplished for example by using guanosine-cytidine base pairs, alternate base pairs (e.g., wobbles), or destabilizing chemically modified nucleotides at terminal nucleotide positions as is known in the art.

[0315] FIG. 21 shows a non-limiting example of how multifunctional siNA molecules of the invention can target two separate target nucleic acid sequences within the same target nucleic acid molecule, such as alternate coding regions of a RNA, coding and non-coding regions of a RNA, or alternate splice variant regions of a RNA. Each strand of the multifunctional siNA construct comprises a region having complementarity to the separate regions of the target nucleic acid molecule. The multifunctional siNA molecule is designed such that each strand of the siNA can be utilized by the RISC complex to initiate RNA interference mediated cleavage of its corresponding target region. These design parameters can include destabilization of each end of the siNA construct (see for example Schwarz et al., 2003, Cell, 115, 199-208). Such destabilization can be accomplished for example by using guanosine-cytidine base pairs, alternate base pairs (e.g., wobbles), or destabilizing chemically modified nucleotides at terminal nucleotide positions as is known in the art.

[0316] FIG. 22(A-H) shows non-limiting examples of tethered multifunctional siNA constructs of the invention. In the examples shown, a linker (e.g., nucleotide or non-nucleotide linker) connects two siNA regions (e.g., two sense, two antisense, or alternately a sense and an antisense region together. Separate sense (or sense and antisense) sequences corresponding to a first target sequence and second target sequence are hybridized to their corresponding sense and/or antisense sequences in the multifunctional siNA. In addition, various conjugates, ligands, aptamers, polymers or reporter molecules can be attached to the linker region for selective or improved delivery and/or pharmacokinetic properties.

[0317] FIG. 23 shows a non-limiting example of various dendrimer based multifunctional siNA designs.

[0318] FIG. 24 shows a non-limiting example of various supramolecular multifunctional siNA designs.

[0319] FIG. 25 shows a non-limiting example of a dicer enabled multifunctional siNA design using a 30 nucleotide precursor siNA construct. A 30 base pair duplex is cleaved by Dicer into 22 and 8 base pair products from either end (8 b.p. fragments not shown). For ease of presentation the overhangs generated by dicer are not shown—but can be compensated for. Three targeting sequences are shown. The required sequence identity overlapped is indicated by grey boxes. The N's of the parent 30 b.p. siNA are suggested sites of 2′-OH positions to enable Dicer cleavage if this is tested in stabilized chemistries. Note that processing of a 30mer duplex by Dicer RNase III does not give a precise 22+8 cleavage, but rather produces a series of closely related products (with 22+8 being the primary site). Therefore, processing by Dicer will yield a series of active siNAs.

[0320] FIG. 26 shows a non-limiting example of a dicer enabled multifunctional siNA design using a 40 nucleotide precursor siNA construct. A 40 base pair duplex is cleaved by Dicer into 20 base pair products from either end. For ease of presentation the overhangs generated by dicer are not shown—but can be compensated for. Four targeting sequences are shown. The target sequences having homology are enclosed by boxes. This design format can be extended to larger RNAs. If chemically stabilized siNAs are bound by Dicer, then strategically located ribonucleotide linkages can enable designer cleavage products that permit our more extensive repertoire of multiifunctional designs. For example cleavage products not limited to the Dicer standard of approximately 22-nucleotides can allow multifunctional siNA constructs with a target sequence identity overlap ranging from, for example, about 3 to about 15 nucleotides.

[0321] FIG. 27 shows a non-limiting example of additional multifunctional siNA construct designs of the invention. In one example, a conjugate, ligand, aptamer, label, or other moiety is attached to a region of the multifunctional siNA to enable improved delivery or pharmacokinetic profiling.

[0322] FIG. 28 shows a non-limiting example of additional multifunctional siNA construct designs of the invention. In one example, a conjugate, ligand, aptamer, label, or other moiety is attached to a region of the multifunctional siNA to enable improved delivery or pharmacokinetic profiling.

[0323] FIG. 29 shows a non-limiting example of a cholesterol linked phosphoramidite that can be used to synthesize cholesterol conjugated siNA molecules of the invention. An example is shown with the cholesterol moiety linked to the 5′-end of the sense strand of a siNA molecule.

### DETAILED DESCRIPTION OF THE INVENTION

Mechanism of Action of Nucleic Acid Molecules of the Invention

[0324] The discussion that follows discusses the proposed mechanism of RNA interference mediated by short interfering RNA as is presently known, and is not meant to be limiting and is not an admission of prior art. Applicant demonstrates herein that chemically-modified short interfering nucleic acids possess similar or improved capacity to mediate RNAi as do siRNA molecules and are expected to possess improved stability and activity in vivo; therefore, this discussion is not meant to be limiting only to siRNA and can be applied to siNA as a whole. By “improved capacity to mediate RNAi” or “improved RNAi activity” is meant to include RNAi activity measured in vitro and/or in vivo where the RNAi activity is a reflection of both the ability of the siNA to mediate RNAi and the stability of the siNAs of the invention. In this invention, the product of these activities can be increased in vitro and/or in vivo compared to an all RNA siRNA or a siNA containing a plurality of ribonucleotides. In some cases, the activity or stability of the siNA molecule can be decreased (i.e., less than ten-fold), but the overall activity of the siNA molecule is enhanced in vitro and/or in vivo.

[0325] RNA interference refers to the process of sequence specific post-transcriptional gene silencing in animals mediated by short interfering RNAs (siRNAs) (Fire et al., 1998, Nature, 391, 806). The corresponding process in plants is commonly referred to as post-transcriptional gene silencing or RNA silencing and is also referred to as quelling in fungi. The process of post-transcriptional gene silencing is thought to be an evolutionarily-conserved cellular defense mechanism used to prevent the expression of foreign genes which is commonly shared by diverse flora and phyla (Fire et al., 1999, Trends Genet., 15, 358). Such protection from foreign gene expression may have evolved in response to the production of double-stranded RNAs (dsRNAs) derived from viral infection or the random integration of transposon elements into a host genome via a cellular response that specifically destroys homologous single-stranded RNA or viral genomic RNA. The presence of dsRNA in cells triggers the RNAi response though a mechanism that has yet to be fully characterized. This mechanism appears to be different from the interferon response that results from dsRNA-mediated activation of protein kinase PKR and 2′,5′-oligoadenylate synthetase resulting in non-specific cleavage of mRNA by ribonuclease L.

[0326] The presence of long dsRNAs in cells stimulates the activity of a ribonuclease III enzyme referred to as Dicer. Dicer is involved in the processing of the dsRNA into short pieces of dsRNA known as short interfering RNAs (siRNAs) (Berstein et al., 2001, Nature, 409, 363). Short interfering RNAs derived from Dicer activity are typically about 21 to about 23 nucleotides in length and comprise about 19 base pair duplexes. Dicer has also been implicated in the excision of 21- and 22-nucleotide small temporal RNAs (stRNAs) from precursor RNA of conserved structure that are implicated in translational control (Hutvagner et al., 2001, Science, 293, 834). The RNAi response also features an endonuclease complex containing a siRNA, commonly referred to as an RNA-induced silencing complex (RISC), which mediates cleavage of single-stranded RNA having sequence homologous to the siRNA. Cleavage of the target RNA takes place in the middle of the region complementary to the guide sequence of the siRNA duplex (Elbashir et al., 2001, Genes Dev., 15, 188). In addition, RNA interference can also involve small RNA (e.g., micro-RNA or miRNA) mediated gene silencing, presumably though cellular mechanisms that regulate chromatin structure and thereby prevent transcription of target gene sequences (see for example Allshire, 2002, Science, 297, 1818-1819; Volpe et al., 2002, Science, 297, 1833-1837; Jenuwein, 2002, Science, 297, 2215-2218; and Hall et al., 2002, Science, 297, 2232-2237). As such, siNA molecules of the invention can be used to mediate gene silencing via interaction with RNA transcripts or alternately by interaction with particular gene sequences, wherein such interaction results in gene silencing either at the transcriptional level or post-transcriptional level.

[0327] RNAi has been studied in a variety of systems. Fire et al., 1998, Nature, 391, 806, were the first to observe RNAi in C. elegans. Wianny and Goetz, 1999, Nature Cell Biol., 2, 70, describe RNAi mediated by dsRNA in mouse embryos. Hammond et al., 2000, Nature, 404, 293, describe RNAi in Drosophila cells transfected with dsRNA. Elbashir et al., 2001, Nature, 411, 494, describe RNAi induced by introduction of duplexes of synthetic 21-nucleotide RNAs in cultured mammalian cells including human embryonic kidney and HeLa cells. Recent work in Drosophila embryonic lysates has revealed certain requirements for siRNA length, structure, chemical composition, and sequence that are essential to mediate efficient RNAi activity. These studies have shown that 21 nucleotide siRNA duplexes are most active when containing two 2-nucleotide 3′-terminal nucleotide overhangs. Furthermore, substitution of one or both siRNA strands with 2′-deoxy or 2′-O-methyl nucleotides abolishes RNAi activity, whereas substitution of 3′-terminal siRNA nucleotides with deoxy nucleotides was shown to be tolerated. Mismatch sequences in the center of the siRNA duplex were also shown to abolish RNAi activity. In addition, these studies also indicate that the position of the cleavage site in the target RNA is defined by the 5′-end of the siRNA guide sequence rather than the 3′-end (Elbashir et al., 2001, EMBO J., 20, 6877). Other studies have indicated that a 5′-phosphate on the target-complementary strand of a siRNA duplex is required for siRNA activity and that ATP is utilized to maintain the 5′-phosphate moiety on the siRNA (Nykanen et al., 2001, Cell, 107, 309); however, siRNA molecules lacking a 5′-phosphate are active when introduced exogenously, suggesting that 5′-phosphorylation of siRNA constructs may occur in vivo.

Duplex Forming Oligonucleotides (DFO) of the Invention

[0328] In one embodiment, the invention features siNA molecules comprising duplex forming oligonucleotides (DFO) that can self-assemble into double stranded oligonucleotides. The duplex forming oligonucleotides of the invention can be chemically synthesized or expressed from transcription units and/or vectors. The DFO molecules of the instant invention provide useful reagents and methods for a variety of therapeutic, diagnostic, agricultural, veterinary, target validation, genomic discovery, genetic engineering and pharmacogenomic applications.

[0329] Applicant demonstrates herein that certain oligonucleotides, refered to herein for convenience but not limitation as duplex forming oligonucleotides or DFO molecules, are potent mediators of sequence specific regulation of gene expression. The oligonucleotides of the invention are distinct from other nucleic acid sequences known in the art (e.g., siRNA, miRNA, stRNA, shRNA, antisense oligonucleotides etc.) in that they represent a class of linear polynucleotide sequences that are designed to self-assemble into double stranded oligonucleotides, where each strand in the double stranded oligonucleotides comprises a nucleotide sequence that is complementary to a target nucleic acid molecule. Nucleic acid molecules of the invention can thus self assemble into functional duplexes in which each strand of the duplex comprises the same polynucleotide sequence and each strand comprises a nucleotide sequence that is complementary to a target nucleic acid molecule.

[0330] Generally, double stranded oligonucleotides are formed by the assembly of two distinct oligonucleotide sequences where the oligonucleotide sequence of one strand is complementary to the oligonucleotide sequence of the second strand; such double stranded oligonucleotides are assembled from two separate oligonucleotides, or from a single molecule that folds on itself to form a double stranded structure, often referred to in the field as hairpin stem-loop structure (e.g., shRNA or short hairpin RNA). These double stranded oligonucleotides known in the art all have a common feature in that each strand of the duplex has a distict nucleotide sequence.

[0331] Distinct from the double stranded nucleic acid molecules known in the art, the applicants have developed a novel, potentially cost effective and simplified method of forming a double stranded nucleic acid molecule starting from a single stranded or linear oligonucleotide. The two strands of the double stranded oligonucleotide formed according to the instant invention have the same nucleotide sequence and are not covalently linked to each other. Such double-stranded oligonucleotides molecules can be readily linked post-synthetically by methods and reagents known in the art and are within the scope of the invention. In one embodiment, the single stranded oligonucleotide of the invention (the duplex forming oligonucleotide) that forms a double stranded oligonucleotide comprises a first region and a second region, where the second region includes a nucleotide sequence that is an inverted repeat of the nucleotide sequence in the first region, or a portion thereof, such that the single stranded oligonucleotide self assembles to form a duplex oligonucleotide in which the nucleotide sequence of one strand of the duplex is the same as the nucleotide sequence of the second strand. Non-limiting examples of such duplex forming oligonucleotides are illustrated in FIGS. 14 and 15. These duplex forming oligonucleotides (DFOs) can optionally include certain palindrome or repeat sequences where such palindrome or repeat sequences are present in between the first region and the second region of the DFO.

[0332] In one embodiment, the invention features a duplex forming oligonucleotide (DFO) molecule, wherein the DFO comprises a duplex forming self complementary nucleic acid sequence that has nucleotide sequence complementary to a target nucleic acid sequence. The DFO molecule can comprise a single self complementary sequence or a duplex resulting from assembly of such self complementary sequences.

[0333] In one embodiment, a duplex forming oligonucleotide (DFO) of the invention comprises a first region and a second region, wherein the second region comprises a nucleotide sequence comprising an inverted repeat of nucleotide sequence of the first region such that the DFO molecule can assemble into a double stranded oligonucleotide. Such double stranded oligonucleotides can act as a short interfering nucleic acid (siNA) to modulate gene expression. Each strand of the double stranded oligonucleotide duplex formed by DFO molecules of the invention can comprise a nucleotide sequence region that is complementary to the same nucleotide sequence in a target nucleic acid molecule (e.g., target target RNA).

[0334] In one embodiment, the invention features a single stranded DFO that can assemble into a double stranded oligonucleotide. The applicant has surprisingly found that a single stranded oligonucleotide with nucleotide regions of self complementarity can readily assemble into duplex oligonucleotide constructs. Such DFOs can assemble into duplexes that can inhibit gene expression in a sequence specific manner. The DFO moleucles of the invention comprise a first region with nucleotide sequence that is complementary to the nucleotide sequence of a second region and where the sequence of the first region is complementary to a target nucleic acid (e.g., RNA). The DFO can form a double stranded oligonucleotide wherein a portion of each strand of the double stranded oligonucleotide comprises a sequence complementary to a target nucleic acid sequence.

[0335] In one embodiment, the invention features a double stranded oligonucleotide, wherein the two strands of the double stranded oligonucleotide are not covalently linked to each other, and wherein each strand of the double stranded oligonucleotide comprises a nucleotide sequence that is complementary to the same nucleotide sequence in a target nucleic acid molecule or a portion thereof (e.g., target RNA target). In another embodiment, the two strands of the double stranded oligonucleotide share an identical nucleotide sequence of at least about 15, preferably at least about 16, 17, 18, 19, 20, or 21 nucleotides.

[0336] In one embodiment, a DFO molecule of the invention comprises a structure having Formula DFO-I:
5′-p-XZX′-3′
wherein Z comprises a palindromic or repeat nucleic acid sequence optionally with one or more modified nucleotides (e.g., nucleotide with a modified base, such as 2-amino purine, 2-amino-1,6-dihydro purine or a universal base), for example of length about 2 to about 24 nucleotides in even numbers (e.g., about 2, 4, 6, 8, 10, 12, 14, 16, 18, 20, or 22 or 24 nucleotides), X represents a nucleic acid sequence, for example of length of about 1 to about 21 nucleotides (e.g., about 1, 2, 3, 4, 5, 6, 7, 8, 9, 10, 11, 12, 13, 14, 15, 16, 17, 18, 19, 20, or 21 nucleotides), X′ comprises a nucleic acid sequence, for example of length about 1 and about 21 nucleotides (e.g., about 1, 2, 3, 4, 5, 6, 7, 8, 9, 10, 11, 12, 13, 14, 15, 16, 17, 18, 19, 20 or 21 nucleotides) having nucleotide sequence complementarity to sequence X or a portion thereof, p comprises a terminal phosphate group that can be present or absent, and wherein sequence X and Z, either independently or together, comprise nucleotide sequence that is complementary to a target nucleic acid sequence or a portion thereof and is of length sufficient to interact (e.g., base pair) with the target nucleic acid sequence or a portion thereof (e.g., target RNA target). For example, X independently can comprise a sequence from about 12 to about 21 or more (e.g., about 12, 13, 14, 15, 16, 17, 18, 19, 20, 21, or more) nucleotides in length that is complementary to nucleotide sequence in a target target RNA or a portion thereof. In another non-limiting example, the length of the nucleotide sequence of X and Z together, when X is present, that is complementary to the target RNA or a portion thereof (e.g., target RNA target) is from about 12 to about 21 or more nucleotides (e.g., about 12, 13, 14, 15, 16, 17, 18, 19, 20, 21, or more). In yet another non-limiting example, when X is absent, the length of the nucleotide sequence of Z that is complementary to the target target RNA or a portion thereof is from about 12 to about 24 or more nucleotides (e.g., about 12, 14, 16, 18, 20, 22, 24, or more). In one embodiment X, Z and X′ are independently oligonucleotides, where X and/or Z comprises a nucleotide sequence of length sufficient to interact (e.g., base pair) with a nucleotide sequence in the target RNA or a portion thereof (e.g., target RNA target). In one embodiment, the lengths of oligonucleotides X and X′ are identical. In another embodiment, the lengths of oligonucleotides X and X′ are not identical. In another embodiment, the lengths of oligonucleotides X and Z, or Z and X′, or X, Z and X′ are either identical or different.

[0337] When a sequence is described in this specification as being of “sufficient” length to interact (i.e., base pair) with another sequence, it is meant that the the length is such that the number of bonds (e.g., hydrogen bonds) formed between the two sequences is enough to enable the two sequence to form a duplex under the conditions of interest. Such conditions can be in vitro (e.g., for diagnostic or assay purposes) or in vivo (e.g., for therapeutic purposes). It is a simple and routine matter to determine such lengths.

[0338] In one embodiment, the invention features a double stranded oligonucleotide construct having Formula DFO-I(a):
5′-p-XZX′-3′
3′-X′ZX-p-5′
wherein Z comprises a palindromic or repeat nucleic acid sequence or palindromic or repeat-like nucleic acid sequence with one or more modified nucleotides (e.g., nucleotides with a modified base, such as 2-amino purine, 2-amino-1,6-dihydro purine or a universal base), for example of length about 2 to about 24 nucleotides in even numbers (e.g., about 2, 4, 6, 8, 10, 12, 14, 16, 18, 20, 22 or 24 nucleotides), X represents a nucleic acid sequence, for example of length about 1 to about 21 nucleotides (e.g., about 1, 2, 3, 4, 5, 6, 7, 8, 9, 10, 11, 12, 13, 14, 15, 16, 17, 18, 19, 20, or 21 nucleotides), X′ comprises a nucleic acid sequence, for example of length about 1 to about 21 nucleotides (e.g., about 1, 2, 3, 4, 5, 6, 7, 8, 9, 10, 11, 12, 13, 14, 15, 16, 17, 18, 19, 20 or 21 nucleotides) having nucleotide sequence complementarity to sequence X or a portion thereof, p comprises a terminal phosphate group that can be present or absent, and wherein each X and Z independently comprises a nucleotide sequence that is complementary to a target nucleic acid sequence or a portion thereof (e.g., target RNA target) and is of length sufficient to interact with the target nucleic acid sequence of a portion thereof (e.g., target RNA target). For example, sequence X independently can comprise a sequence from about 12 to about 21 or more nucleotides (e.g., about 12, 13, 14, 15, 16, 17, 18, 19, 20, 21, or more) in length that is complementary to a nucleotide sequence in a target RNA or a portion thereof (e.g., target RNA target). In another non-limiting example, the length of the nucleotide sequence of X and Z together (when X is present) that is complementary to the target target RNA or a portion thereof is from about 12 to about 21 or more nucleotides (e.g., about 12, 13, 14, 15, 16, 17, 18, 19, 20, 21, or more). In yet another non-limiting example, when X is absent, the length of the nucleotide sequence of Z that is complementary to the target target RNA or a portion thereof is from about 12 to about 24 or more nucleotides (e.g., about 12, 14, 16, 18, 20, 22, 24 or more). In one embodiment X, Z and X′ are independently oligonucleotides, where X and/or Z comprises a nucleotide sequence of length sufficient to interact (e.g., base pair) with nucleotide sequence in the target RNA or a portion thereof (e.g., target RNA target). In one embodiment, the lengths of oligonucleotides X and X′ are identical. In another embodiment, the lengths of oligonucleotides X and X′ are not identical. In another embodiment, the lengths of oligonucleotides X and Z or Z and X′ or X, Z and X′ are either identical or different. In one embodiment, the double stranded oligonucleotide construct of Formula I(a) includes one or more, specifically 1, 2, 3 or 4, mismatches, to the extent such mismatches do not significantly diminish the ability of the double stranded oligonucleotide to inhibit target gene expression.

[0339] In one embodiment, a DFO molecule of the invention comprises structure having Formula DFO-II:
5′-p-XX′-3′
wherein each X and X′ are independently oligonucleotides of length about 12 nucleotides to about 21 nucleotides, wherein X comprises, for example, a nucleic acid sequence of length about 12 to about 21 nucleotides (e.g., about 12, 13, 14, 15, 16, 17, 18, 19, 20 or 21 nucleotides), X′ comprises a nucleic acid sequence, for example of length about 12 to about 21 nucleotides (e.g., about 12, 13, 14, 15, 16, 17, 18, 19, 20, or 21 nucleotides) having nucleotide sequence complementarity to sequence X or a portion thereof, p comprises a terminal phosphate group that can be present or absent, and wherein X comprises a nucleotide sequence that is complementary to a target nucleic acid sequence (e.g., target RNA) or a portion thereof and is of length sufficient to interact (e.g., base pair) with the target nucleic acid sequence of a portion thereof. In one embodiment, the length of oligonucleotides X and X′ are identical. In another embodiment the length of oligonucleotides X and X′ are not identical. In one embodiment, length of the oligonucleotides X and X′ are sufficint to form a relatively stable double stranded oligonucleotide.

[0340] In one embodiment, the invention features a double stranded oligonucleotide construct having Formula DFO-II(a):
5′-p-XX′-3′
3′-X′X-p-5′
wherein each X and X′ are independently oligonucleotides of length about 12 nucleotides to about 21 nucleotides, wherein X comprises a nucleic acid sequence, for example of length about 12 to about 21 nucleotides (e.g., about 12, 13, 14, 15, 16, 17, 18, 19, 20 or 21 nucleotides), X′ comprises a nucleic acid sequence, for example of length about 12 to about 21 nucleotides (e.g., about 12, 13, 14, 15, 16, 17, 18, 19, 20 or 21 nucleotides) having nucleotide sequence complementarity to sequence X or a portion thereof, p comprises a terminal phosphate group that can be present or absent, and wherein X comprises nucleotide sequence that is complementary to a target nucleic acid sequence or a portion thereof (e.g., target RNA target) and is of length sufficient to interact (e.g., base pair) with the target nucleic acid sequence (e.g., target RNA) or a portion thereof. In one embodiment, the lengths of oligonucleotides X and X′ are identical. In another embodiment, the lengths of oligonucleotides X and X′ are not identical. In one embodiment, the lengths of the oligonucleotides X and X′ are sufficint to form a relatively stable double stranded oligonucleotide. In one embodiment, the double stranded oligonucleotide construct of Formula II(a) includes one or more, specifically 1, 2, 3 or 4, mismatches, to the extent such mismatches do not significantly diminish the ability of the double stranded oligonucleotide to inhibit target gene expression.

[0341] In one embodiment, the invention features a DFO molecule having Formula DFO-I(b):
5′-p-Z-3′
where Z comprises a palindromic or repeat nucleic acid sequence optionally including one or more non-standard or modified nucleotides (e.g., nucleotide with a modified base, such as 2-amino purine or a universal base) that can facilitate base-pairing with other nucleotides. Z can be, for example, of length sufficient to interact (e.g., base pair) with nucleotide sequence of a target nucleic acid (e.g., target RNA) molecule, preferably of length of at least 12 nucleotides, specifically about 12 to about 24 nucleotides (e.g., about 12, 14, 16, 18, 20, 22 or 24 nucleotides). p represents a terminal phosphate group that can be present or absent.

[0342] In one embodiment, a DFO molecule having any of Formula DFO-I, DFO-I(a), DFO-I(b), DFO-II(a) or DFO-II can comprise chemical modifications as described herein without limitation, such as, for example, nucleotides having any of Formulae I-VII, stabilization chemistries as described in Table IV, or any other combination of modified nucleotides and non-nucleotides as described in the various embodiments herein.

[0343] In one embodiment, the palidrome or repeat sequence or modified nucleotide (e.g., nucleotide with a modified base, such as 2-amino purine or a universal base) in Z of DFO constructs having Formula DFO-I, DFO-I(a) and DFO-I(b), comprises chemically modified nucleotides that are able to interact with a portion of the target nucleic acid sequence (e.g., modified base analogs that can form Watson Crick base pairs or non-Watson Crick base pairs).

[0344] In one embodiment, a DFO molecule of the invention, for example a DFO having Formula DFO-I or DFO-II, comprises about 15 to about 40 nucleotides (e.g., about 15, 16, 17, 18, 19, 20, 21, 22, 23, 24, 25, 26, 27, 28, 29, 30, 31, 32, 33, 34, 35, 36, 37, 38, 39, or 40 nucleotides). In one embodiment, a DFO molecule of the invention comprises one or more chemical modifications. In a non-limiting example, the introduction of chemically modified nucleotides and/or non-nucleotides into nucleic acid molecules of the invention provides a powerful tool in overcoming potential limitations of in vivo stability and bioavailability inherent to unmodified RNA molecules that are delivered exogenously. For example, the use of chemically modified nucleic acid molecules can enable a lower dose of a particular nucleic acid molecule for a given therapeutic effect since chemically modified nucleic acid molecules tend to have a longer half-life in serum or in cells or tissues. Furthermore, certain chemical modifications can improve the bioavailability and/or potency of nucleic acid molecules by not only enhancing half-life but also facilitating the targeting of nucleic acid molecules to particular organs, cells or tissues and/or improving cellular uptake of the nucleic acid molecules. Therefore, even if the activity of a chemically modified nucleic acid molecule is reduced in vitro as compared to a native/unmodified nucleic acid molecule, for example when compared to an unmodified RNA molecule, the overall activity of the modified nucleic acid molecule can be greater than the native or unmodified nucleic acid molecule due to improved stability, potency, duration of effect, bioavailability and/or delivery of the molecule.

Multifunctional or Multi-Targeted siNA Molecules of the Invention

[0345] In one embodiment, the invention features siNA molecules comprising multifunctional short interfering nucleic acid (multifunctional siNA) molecules that modulate the expression of one or more genes in a biologic system, such as a cell, tissue, or organism. The multifunctional short interfering nucleic acid (multifunctional siNA) molecules of the invention can target more than one region a target nucleic acid sequence or can target sequences of more than one distinct target nucleic acid molecules. The multifunctional siNA molecules of the invention can be chemically synthesized or expressed from transcription units and/or vectors. The multifunctional siNA molecules of the instant invention provide useful reagents and methods for a variety of human applications, therapeutic, cosmetic, diagnostic, agricultural, veterinary, target validation, genomic discovery, genetic engineering and pharmacogenomic applications.

[0346] Applicant demonstrates herein that certain oligonucleotides, refered to herein for convenience but not limitation as multifunctional short interfering nucleic acid or multifunctional siNA molecules, are potent mediators of sequence specific regulation of gene expression. The multifunctional siNA molecules of the invention are distinct from other nucleic acid sequences known in the art (e.g., siRNA, miRNA, stRNA, shRNA, antisense oligonucleotides, etc.) in that they represent a class of polynucleotide molecules that are designed such that each strand in the multifunctional siNA construct comprises a nucleotide sequence that is complementary to a distinct nucleic acid sequence in one or more target nucleic acid molecules. A single multifunctional siNA molecule (generally a double-stranded molecule) of the invention can thus target more than one (e.g., 2, 3, 4, 5, or more) differing target nucleic acid target molecules. Nucleic acid molecules of the invention can also target more than one (e.g., 2, 3, 4, 5, or more) region of the same target nucleic acid sequence. As such multifunctional siNA molecules of the invention are useful in down regulating or inhibiting the expression of one or more target nucleic acid molecules. By reducing or inhibiting expression of more than one target nucleic acid molecule with one multifunctional siNA construct, multifunctional siNA molecules of the invention represent a class of potent therapeutic agents that can provide simultaneous inhibition of multiple targets within a disease or pathogen related pathway. Such simultaneous inhibition can provide synergistic therapeutic treatment strategies without the need for separate preclinical and clinical development efforts or complex regulatory approval process.

[0347] Use of multifunctional siNA molecules that target more then one region of a target nucleic acid molecule (e.g., messenger RNA) is expected to provide potent inhibition of gene expression. For example, a single multifunctional siNA construct of the invention can target both conserved and variable regions of a target nucleic acid molecule, such as a target RNA or DNA, thereby allowing down regulation or inhibition of different splice variants encoded by a single gene, or allowing for targeting of both coding and non-coding regions of a target nucleic acid molecule.

[0348] Generally, double stranded oligonucleotides are formed by the assembly of two distinct oligonucleotides where the oligonucleotide sequence of one strand is complementary to the oligonucleotide sequence of the second strand; such double stranded oligonucleotides are generally assembled from two separate oligonucleotides (e.g., siRNA). Alternately, a duplex can be formed from a single molecule that folds on itself (e.g., shRNA or short hairpin RNA). These double stranded oligonucleotides are known in the art to mediate RNA interference and all have a common feature wherein only one nucleotide sequence region (guide sequence or the antisense sequence) has complementarity to a target nucleic acid sequence, and the other strand (sense sequence) comprises nucleotide sequence that is homologous to the target nucleic acid sequence. Generally, the antisense sequence is retained in the active RISC complex and guides the RISC to the target nucleotide sequence by means of complementary base-pairing of the antisense sequence with the target seqeunce for mediating sequence-specific RNA interference. It is known in the art that in some cell culture systems, certain types of unmodified siRNAs can exhibit “off target” effects. It is hypothesized that this off-target effect involves the participation of the sense sequence instead of the antisense sequence of the siRNA in the RISC complex (see for example Schwarz et al., 2003, Cell, 115, 199-208). In this instance the sense sequence is believed to direct the RISC complex to a sequence (off-target sequence) that is distinct from the intended target sequence, resulting in the inhibition of the off-target sequence. In these double stranded nucleic acid molecules, each strand is complementary to a distinct target nucleic acid sequence. However, the off-targets that are affected by these dsRNAs are not entirely predictable and are non-specific.

[0349] Distinct from the double stranded nucleic acid molecules known in the art, the applicants have developed a novel, potentially cost effective and simplified method of down regulating or inhibiting the expression of more than one target nucleic acid sequence using a single multifunctional siNA construct. The multifunctional siNA molecules of the invention are designed to be double-stranded or partially double stranded, such that a portion of each strand or region of the multifunctional siNA is complementary to a target nucleic acid sequence of choice. As such, the multifunctional siNA molecules of the invention are not limited to targeting sequences that are complementary to each other, but rather to any two differing target nucleic acid sequences. Multifunctional siNA molecules of the invention are designed such that each strand or region of the multifunctional siNA molecule, that is complementary to a given target nucleic acid sequence, is of suitable length (e.g., from about 16 to about 28 nucleotides in length, preferably from about 18 to about 28 nucleotides in length) for mediating RNA interference against the target nucleic acid sequence. The complementarity between the target nucleic acid sequence and a strand or region of the multifunctional siNA must be sufficient (at least about 8 base pairs) for cleavage of the target nucleic acid sequence by RNA interference. multifunctional siNA of the invention is expected to minimize off-target effects seen with certain siRNA sequences, such as those described in (Schwarz et al., supra).

[0350] It has been reported that dsRNAs of length between 29 base pairs and 36 base pairs (Tuschl et al., International PCT Publication No. WO 02/44321) do not mediate RNAi. One reason these dsRNAs are inactive may be the lack of turnover or dissociation of the strand that interacts with the target RNA sequence, such that the RISC complex is not able to efficiently interact with multiple copies of the target RNA resulting in a significant decrease in the potency and efficiency of the RNAi process. Applicant has surprisingly found that the multifunctional siNAs of the invention can overcome this hurdle and are capable of enhancing the efficiency and potency of RNAi process. As such, in certain embodiments of the invention, multifunctional siNAs of length of about 29 to about 36 base pairs can be designed such that, a portion of each strand of the multifunctional siNA molecule comprises a nucleotide sequence region that is complementary to a target nucleic acid of length sufficient to mediate RNAi efficiently (e.g., about 15 to about 23 base pairs) and a nucleotide sequence region that is not complementary to the target nucleic acid. By having both complementary and non-complementary portions in each strand of the multifunctional siNA, the multifunctional siNA can mediate RNA interference against a target nucleic acid sequence without being prohibitive to turnover or dissociation (e.g., where the length of each strand is too long to mediate RNAi against the respective target nucleic acid sequence). Furthermore, design of multifunctional siNA molecules of the invention with internal overlapping regions allows the multifunctional siNA molecules to be of favorable (decreased) size for mediating RNA interference and of size that is well suited for use as a therapeutic agent (e.g., wherein each strand is independently from about 18 to about 28 nucleotides in length). Non-limiting examples are illustrated in FIGS. 16-28.

[0351] In one embodiment, a multifunctional siNA molecule of the invention comprises a first region and a second region, where the first region of the multifunctional siNA comprises a nucleotide sequence complementary to a nucleic acid sequence of a first target nucleic acid molecule, and the second region of the multifunctional siNA comprises nucleic acid sequence complementary to a nucleic acid sequence of a second target nucleic acid molecule. In one embodiment, a multifunctional siNA molecule of the invention comprises a first region and a second region, where the first region of the multifunctional siNA comprises nucleotide sequence complementary to a nucleic acid sequence of the first region of a target nucleic acid molecule, and the second region of the multifunctional siNA comprises nucleotide sequence complementary to a nucleic acid sequence of a second region of a the target nucleic acid molecule. In another embodiment, the first region and second region of the multifunctional siNA can comprise separate nucleic acid sequences that share some degree of complementarity (e.g., from about 1 to about 10 complementary nucleotides). In certain embodiments, multifunctional siNA constructs comprising separate nucleic acid seqeunces can be readily linked post-synthetically by methods and reagents known in the art and such linked constructs are within the scope of the invention. Alternately, the first region and second region of the multifunctional siNA can comprise a single nucleic acid sequence having some degree of self complementarity, such as in a hairpin or stem-loop structure. Non-limiting examples of such double stranded and hairpin multifunctional short interfering nucleic acids are illustrated in FIGS. 16 and 17 respectively. These multifunctional short interfering nucleic acids (multifunctional siNAs) can optionally include certain overlapping nucleotide sequence where such overlapping nucleotide sequence is present in between the first region and the second region of the multifunctional siNA (see for example FIGS. 18 and 19). In one embodiment, the first target nucleic acid molecule and the second nucleic acid target molecule are one or more HDCA target sequences, such as any HDAC 1, HDAC 2, HCAC 3, HDAC 4, HDAC 5, HDAC 6, HDAC 7, HDAC 8, HDAC 9a, HDAC 9b, HDAC 10, and/or HDAC 11, and/or SIR T1, 2, 3, 4, 5, 6, and/or 7 nucleic acid sequence.

[0352] In one embodiment, the invention features a multifunctional short interfering nucleic acid (multifunctional siNA) molecule, wherein each strand of the the multifunctional siNA independently comprises a first region of nucleic acid sequence that is complementary to a distinct target nucleic acid sequence and the second region of nucleotide sequence that is not complementary to the target sequence. The target nucleic acid sequence of each strand is in the same target nucleic acid molecule or different target nucleic acid molecules. In one embodiment, the nucleic acid target molecule(s) comprises one or more HDCA target sequence, such as any HDAC 1, HDAC 2, HCAC 3, HDAC 4, HDAC 5, HDAC 6, HDAC 7, HDAC 8, HDAC 9a, HDAC 9b, HDAC 10, and/or HDAC 11, and/or SIR T1, 2, 3, 4, 5, 6, and/or 7 nucleic acid sequence.

[0353] In another embodiment, the multifunctional siNA comprises two strands, where: (a) the first strand comprises a region having sequence complementarity to a target nucleic acid sequence (complementary region 1) and a region having no sequence complementarity to the target nucleotide sequence (non-complementary region 1); (b) the second strand of the multifunction siNA comprises a region having sequence complementarity to a target nucleic acid sequence that is distinct from the target nucleotide sequence complementary to the first strand nucleotide sequence (complementary region 2), and a region having no sequence complementarity to the target nucleotide sequence of complementary region 2 (non-complementary region 2); (c) the complementary region 1 of the first strand comprises a nucleotide sequence that is complementary to a nucleotide sequence in the non-complementary region 2 of the second strand and the complementary region 2 of the second strand comprises a nucleotide sequence that is complementary to a nucleotide sequence in the non-complementary region 1 of the first strand. The target nucleic acid sequence of complementary region 1 and complementary region 2 is in the same target nucleic acid molecule or different target nucleic acid molecules. In one embodiment, the nucleic acid target molecule(s) comprises one or more HDCA target sequence, such as any HDAC 1, HDAC 2, HCAC 3, HDAC 4, HDAC 5, HDAC 6, HDAC 7, HDAC 8, HDAC 9a, HDAC 9b, HDAC 10, and/or HDAC 11, and/or SIR T1, 2, 3, 4, 5, 6, and/or 7 nucleic acid sequence.

[0354] In another embodiment, the multifunctional siNA comprises two strands, where: (a) the first strand comprises a region having sequence complementarity to a target nucleic acid sequence derived from a gene (complementary region 1) and a region having no sequence complementarity to the target nucleotide sequence of complementary region 1 (non-complementary region 1); (b) the second strand of the multifunction siNA comprises a region having sequence complementarity to a target nucleic acid sequence derived from a gene that is distinct from the gene of complementary region 1 (complementary region 2), and a region having no sequence complementarity to the target nucleotide sequence of complementary region 2 (non-complementary region 2); (c) the complementary region 1 of the first strand comprises a nucleotide sequence that is complementary to a nucleotide sequence in the non-complementary region 2 of the second strand and the complementary region 2 of the second strand comprises a nucleotide sequence that is complementary to a nucleotide sequence in the non-complementary region 1 of the first strand. In one embodiment, the nucleic acid target sequence comprises one or more HDCA target sequences, such as any HDAC 1, HDAC 2, HCAC 3, HDAC 4, HDAC 5, HDAC 6, HDAC 7, HDAC 8, HDAC 9a, HDAC 9b, HDAC 10, and/or HDAC 11, and/or SIR T1, 2, 3, 4, 5, 6, and/or 7 nucleic acid sequence.

[0355] In another embodiment, the multifunctional siNA comprises two strands, where: (a) the first strand comprises a region having sequence complementarity to a target nucleic acid sequence derived from a first gene (complementary region 1) and a region having no sequence complementarity to the target nucleotide sequence of complementary region 1 (non-complementary region 1); (b) the second strand of the multifunction siNA comprises a region having sequence complementarity to a second target nucleic acid sequence distinct from the first target nucleic acid sequence of complementary region 1 (complementary region 2), provided, however, that the target nucleic acid sequence for complementary region 1 and target nucleic acid sequence for complementary region 2 are both derived from the same gene, and a region having no sequence complementarity to the target nucleotide sequence of complementary region 2 (non-complementary region 2); (c) the complementary region 1 of the first strand comprises a nucleotide sequence that is complementary to a nucleotide sequence in the non-complementary region 2 of the second strand and the complementary region 2 of the second strand comprises a nucleotide sequence that is complementary to nucleotide sequence in the non-complementary region 1 of the first strand. In one embodiment, the nucleic acid target sequence comprises one or more HDCA target sequences, such as any HDAC 1, HDAC 2, HCAC 3, HDAC 4, HDAC 5, HDAC 6, HDAC 7, HDAC 8, HDAC 9a, HDAC 9b, HDAC 10, and/or HDAC 11, and/or SIR T1, 2, 3, 4, 5, 6, and/or 7 nucleic acid sequence.

[0356] In one embodiment, the invention features a multifunctional short interfering nucleic acid (multifunctional siNA) molecule, wherein the multifunctional siNA comprises two complementary nucleic acid sequences in which the first sequence comprises a first region having nucleotide sequence complementary to nucleotide sequence within a first target nucleic acid molecule, and in which the second seqeunce comprises a first region having nucleotide sequence complementary to a distinct nucleotide sequence within the same target nucleic acid molecule. Preferably, the first region of the first sequence is also complementary to the nucleotide sequence of the second region of the second sequence, and where the first region of the second sequence is complementary to the nucleotide sequence of the second region of the first sequence. In one embodiment, the nucleic acid target sequence comprises one or more HDCA target sequences, such as any HDAC 1, HDAC 2, HCAC 3, HDAC 4, HDAC 5, HDAC 6, HDAC 7, HDAC 8, HDAC 9a, HDAC 9b, HDAC 10, and/or HDAC 11, and/or SIR T1, 2, 3, 4, 5, 6, and/or 7 nucleic acid sequence.

[0357] In one embodiment, the invention features a multifunctional short interfering nucleic acid (multifunctional siNA) molecule, wherein the multifunctional siNA comprises two complementary nucleic acid sequences in which the first sequence comprises a first region having a nucleotide sequence complementary to a nucleotide sequence within a first target nucleic acid molecule, and in which the second seqeunce comprises a first region having a nucleotide sequence complementary to a distinct nucleotide sequence within a second target nucleic acid molecule. Preferably, the first region of the first sequence is also complementary to the nucleotide sequence of the second region of the second sequence, and where the first region of the second sequence is complementary to the nucleotide sequence of the second region of the first sequence. In one embodiment, the nucleic acid target sequence comprises one or more HDCA target sequences, such as any HDAC 1, HDAC 2, HCAC 3, HDAC 4, HDAC 5, HDAC 6, HDAC 7, HDAC 8, HDAC 9a, HDAC 9b, HDAC 10, and/or HDAC 11, and/or SIR T1, 2, 3, 4, 5, 6, and/or 7 nucleic acid sequence.

[0358] In one embodiment, the invention features a multifunctional siNA molecule comprising a first region and a second region, where the first region comprises a nucleic acid sequence having about 18 to about 28 nucleotides complementary to a nucleic acid sequence within a first target nucleic acid molecule, and the second region comprises nucleotide sequence having about 18 to about 28 nucleotides complementary to a distinct nucleic acid sequence within a second target nucleic acid molecule. In one embodiment, the first nucleic acid target molecule and the second target nucleic acid molecule are selected from the group consisting of any of HDAC 1, HDAC 2, HCAC 3, HDAC 4, HDAC 5, HDAC 6, HDAC 7, HDAC 8, HDAC 9a, HDAC 9b, HDAC 10, and/or HDAC 11, and/or SIR T1, 2, 3, 4, 5, 6, and/or 7 nucleic acid sequences.

[0359] In one embodiment, the invention features a multifunctional siNA molecule comprising a first region and a second region, where the first region comprises nucleic acid sequence having about 18 to about 28 nucleotides complementary to a nucleic acid sequence within a target nucleic acid molecule, and the second region comprises nucleotide sequence having about 18 to about 28 nucleotides complementary to a distinct nucleic acid sequence within the same target nucleic acid molecule. In one embodiment, the nucleic acid target molecule is selected from the group consisting of any of HDAC 1, HDAC 2, HCAC 3, HDAC 4, HDAC 5, HDAC 6, HDAC 7, HDAC 8, HDAC 9a, HDAC 9b, HDAC 10, and/or HDAC 11, and/or SIR T1, 2, 3, 4, 5, 6, and/or 7 nucleic acid sequences.

[0360] In one embodiment, the invention features a double stranded multifunctional short interfering nucleic acid (multifunctional siNA) molecule, wherein one strand of the multifunctional siNA comprises a first region having nucleotide sequence complementary to a first target nucleic acid sequence, and the second strand comprises a first region having a nucleotide sequence complementary to a second target nucleic acid sequence. The first and second target nucleic acid sequences can be present in separate target nucleic acid molecules or can be different regions within the same target nucleic acid molecule. As such, multifunctional siNA molecules of the invention can be used to target the expression of different genes, splice variants of the same gene, both mutant and conserved regions of one or more gene transcripts, or both coding and non-coding sequences of the same or differeing genes or gene transcripts. In one embodiment, the first nucleic acid target sequence and the second target nucleic acid sequence are selected from the group consisting of any of HDAC 1, HDAC 2, HCAC 3, HDAC 4, HDAC 5, HDAC 6, HDAC 7, HDAC 8, HDAC 9a, HDAC 9b, HDAC 10, and/or HDAC 11, and/or SIR T1, 2, 3, 4, 5, 6, and/or 7 nucleic acid sequences.

[0361] In one embodiment, a target nucleic acid molecule of the invention encodes a single protein. In another embodiment, a target nucleic acid molecule encodes more than one protein (e.g., 1, 2, 3, 4, 5 or more proteins). As such, a multifunctional siNA construct of the invention can be used to down regulate or inhibit the expression of several proteins (e.g., any of HDAC 1, HDAC 2, HCAC 3, HDAC 4, HDAC 5, HDAC 6, HDAC 7, HDAC 8, HDAC 9a, HDAC 9b, HDAC 10, and/or HDAC 11, and/or SIR T1, 2, 3, 4, 5, 6, and/or 7 proteins). For example, a multifunctional siNA molecule comprising a region in one strand having nucleotide sequence complementarity to a first target nucleic acid sequence derived from a gene encoding one protein and the second strand comprising a region with nucleotide sequence complementarity to a second target nucleic acid sequence present in target nucleic acid molecules derived from genes encoding two or more proteins (e.g., two or more differing target sequences) can be used to down regulate, inhibit, or shut down a particular biologic pathway by targeting, for example, two or more targets involved in a biologic pathway.

[0362] In one embodiment the invention takes advantage of conserved nucleotide sequences present in different isoforms of cytokines or ligands and receptors for the cytokines or ligands. By designing multifunctional siNAs in a manner where one strand includes a sequence that is complementary to a target nucleic acid sequence conserved among various isoforms of a cytokine and the other strand includes sequence that is complementary to a target nucleic acid sequence conserved among the receptors for the cytokine, it is possible to selectively and effectively modulate or inhibit a biological pathway or multiple genes in a biological pathway using a single multifunctional siNA.

[0363] In one embodiment, a double stranded multifunctional siNA molecule of the invention comprises a structure having Formula MF-I:
5′-p-XZX′-3′
3′-Y′ZY-p-5′
wherein each 5′-p-XZX′-3′ and 5′-p-YZY′-3′ are independently an oligonucleotide of length of about 20 nucleotides to about 300 nucleotides, preferably of about 20 to about 200 nucleotides, about 20 to about 100 nucleotides, about 20 to about 40 nucleotides, about 20 to about 40 nucleotides, about 24 to about 38 nucleotides, or about 26 to about 38 nucleotides; XZ comprises a nucleic acid sequence that is complementary to a first target nucleic acid sequence; YZ is an oligonucleotide comprising nucleic acid sequence that is complementary to a second target nucleic acid sequence; Z comprises nucleotide sequence of length about 1 to about 24 nucleotides (e.g., about 1, 2, 3, 4, 5, 6, 7, 8, 9, 10, 11, 12, 13, 14, 15, 16, 17, 18, 19, 20, 21, 22, 23, or 24 nucleotides) that is self complimentary; X comprises nucleotide sequence of length about 1 to about 100 nucleotides, preferably about 1 to about 21 nucleotides (e.g., about 1, 2, 3, 4, 5, 6, 7, 8, 9, 10, 11, 12, 13, 14, 15, 16, 17, 18, 19, 20, or 21 nucleotides) that is complementary to nucleotide sequence present in region Y′; Y comprises nucleotide sequence of length about 1 to about 100 nucleotides, prefereably about 1-about 21 nucleotides (e.g., about 1, 2, 3, 4, 5, 6, 7, 8, 9, 10, 11, 12, 13, 14, 15, 16, 17, 18, 19, 20 or 21 nucleotides) that is complementary to nucleotide sequence present in region X′; each p comprises a terminal phosphate group that is independently present or absent; each XZ and YZ is independently of length sufficient to stably interact (i.e., base pair) with the first and second target nucleic acid sequence, respectively, or a portion thereof. For example, each sequence X and Y can independently comprise sequence from about 12 to about 21 or more nucleotides in length (e.g., about 12, 13, 14, 15, 16, 17, 18, 19, 20, 21, or more) that is complementary to a target nucleotide sequence in different target nucleic acid molecules, such as target RNAs or a portion thereof. In another non-limiting example, the length of the nucleotide sequence of X and Z together that is complementary to the first target nucleic acid sequence or a portion thereof is from about 12 to about 21 or more nucleotides (e.g., about 12, 13, 14, 15, 16, 17, 18, 19, 20, 21, or more). In another non-limiting example, the length of the nucleotide sequence of Y and Z together, that is complementary to the second target nucleic acid sequence or a portion thereof is from about 12 to about 21 or more nucleotides (e.g., about 12, 13, 14, 15, 16, 17, 18, 19, 20, 21, or more). In one embodiment, the first target nucleic acid sequence and the second target nucleic acid sequence are present in the same target nucleic acid molecule (e.g., target RNA). In another embodiment, the first target nucleic acid sequence and the second target nucleic acid sequence are present in different target nucleic acid molecules. In one embodiment, Z comprises a palindrome or a repeat sequence. In one embodiment, the lengths of oligonucleotides X and X′ are identical. In another embodiment, the lengths of oligonucleotides X and X′ are not identical. In one embodiment, the lengths of oligonucleotides Y and Y′ are identical. In another embodiment, the lengths of oligonucleotides Y and Y′ are not identical. In one embodiment, the double stranded oligonucleotide construct of Formula I(a) includes one or more, specifically 1, 2, 3 or 4, mismatches, to the extent such mismatches do not significantly diminish the ability of the double stranded oligonucleotide to inhibit target gene expression.

[0364] In one embodiment, a multifunctional siNA molecule of the invention comprises a structure having Formula MF-II:
5′-p-XX′-3′
3′-Y′Y-p-5′
wherein each 5′-p-XX′-3′ and 5′-p-YY′-3′ are independently an oligonucleotide of length of about 20 nucleotides to about 300 nucleotides, preferably about 20 to about 200 nucleotides, about 20 to about 100 nucleotides, about 20 to about 40 nucleotides, about 20 to about 40 nucleotides, about 24 to about 38 nucleotides, or about 26 to about 38 nucleotides; X comprises a nucleic acid sequence that is complementary to a first target nucleic acid sequence; Y is an oligonucleotide comprising nucleic acid sequence that is complementary to a second target nucleic acid sequence; X comprises a nucleotide sequence of length about 1 to about 100 nucleotides, preferably about 1 to about 21 nucleotides (e.g., about 1, 2, 3, 4, 5, 6, 7, 8, 9, 10, 11, 12, 13, 14, 15, 16, 17, 18, 19, 20, or 21 nucleotides) that is complementary to nucleotide sequence present in region Y′; Y comprises nucleotide sequence of length about 1 to about 100 nucleotides, prefereably about 1 to about 21 nucleotides (e.g., about 1, 2, 3, 4, 5, 6, 7, 8, 9, 10, 11, 12, 13, 14, 15, 16, 17, 18, 19, 20 or 21 nucleotides) that is complementary to nucleotide sequence present in region X′; each p comprises a terminal phosphate group that is independently present or absent; each X and Y independently is of length sufficient to stably interact (i.e., base pair) with the first and second target nucleic acid sequence, respectively, or a portion thereof. For example, each sequence X and Y can independently comprise sequence from about 12 to about 21 or more nucleotides in length (e.g., about 12, 13, 14, 15, 16, 17, 18, 19, 20, 21, or more) that is complementary to a target nucleotide sequence in different target nucleic acid molecules or a portion thereof. In one embodiment, the first target nucleic acid sequence and the second target nucleic acid sequence are present in the same target nucleic acid molecule (e.g., target RNA or DNA). In another embodiment, the first target nucleic acid sequence and the second target nucleic acid sequence are present in different target nucleic acid molecules or a portion thereof. In one embodiment, Z comprises a palindrome or a repeat sequence. In one embodiment, the lengths of oligonucleotides X and X′ are identical. In another embodiment, the lengths of oligonucleotides X and X′ are not identical. In one embodiment, the lengths of oligonucleotides Y and Y′ are identical. In another embodiment, the lengths of oligonucleotides Y and Y′ are not identical. In one embodiment, the double stranded oligonucleotide construct of Formula I(a) includes one or more, specifically 1, 2, 3 or 4, mismatches, to the extent such mismatches do not significantly diminish the ability of the double stranded oligonucleotide to inhibit target gene expression.

[0365] In one embodiment, a multifunctional siNA molecule of the invention comprises a structure having Formula MF-III:
XX′
Y′—W—Y
wherein each X, X′, Y, and Y′ is independently an oligonucleotide of length of about 15 nucleotides to about 50 nucleotides, preferably about 18 to about 40 nucleotides, or about 19 to about 23 nucleotides; X comprises nucleotide sequence that is complementary to nucleotide sequence present in region Y′; X′ comprises nucleotide sequence that is complementary to nucleotide sequence present in region Y; each X and X′ is independently of length sufficient to stably interact (i.e., base pair) with a first and a second target nucleic acid sequence, respectively, or a portion thereof; W represents a nucleotide or non-nucleotide linker that connects sequences Y′ and Y; and the multifunctional siNA directs cleavage of the first and second target sequence via RNA interference. In one embodiment, the first target nucleic acid sequence and the second target nucleic acid sequence are present in the same target nucleic acid molecule (e.g., target RNA). In another embodiment, the first target nucleic acid sequence and the second target nucleic acid sequence are present in different target nucleic acid molecules or a portion thereof. In one embodiment, region W connects the 3′-end of sequence Y′ with the 3′-end of sequence Y. In one embodiment, region W connects the 3′-end of sequence Y′ with the 5′-end of sequence Y. In one embodiment, region W connects the 5′-end of sequence Y′ with the 5′-end of sequence Y. In one embodiment, region W connects the 5′-end of sequence Y′ with the 3′-end of sequence Y. In one embodiment, a terminal phosphate group is present at the 5′-end of sequence X. In one embodiment, a terminal phosphate group is present at the 5′-end of sequence X′. In one embodiment, a terminal phosphate group is present at the 5′-end of sequence Y. In one embodiment, a terminal phosphate group is present at the 5′-end of sequence Y′. In one embodiment, W connects sequences Y and Y′ via a biodegradable linker. In one embodiment, W further comprises a conjugate, label, aptamer, ligand, lipid, or polymer.

[0366] In one embodiment, a multifunctional siNA molecule of the invention comprises a structure having Formula MF-IV:
XX′
Y′—W—Y
wherein each X, X′, Y, and Y′ is independently an oligonucleotide of length of about 15 nucleotides to about 50 nucleotides, preferably about 18 to about 40 nucleotides, or about 19 to about 23 nucleotides; X comprises nucleotide sequence that is complementary to nucleotide sequence present in region Y′; X′ comprises nucleotide sequence that is complementary to nucleotide sequence present in region Y; each Y and Y′ is independently of length sufficient to stably interact (i.e., base pair) with a first and a second target nucleic acid sequence, respectively, or a portion thereof; W represents a nucleotide or non-nucleotide linker that connects sequences Y′ and Y; and the multifunctional siNA directs cleavage of the first and second target sequence via RNA interference. In one embodiment, the first target nucleic acid sequence and the second target nucleic acid sequence are present in the same target nucleic acid molecule (e.g., target RNA). In another embodiment, the first target nucleic acid sequence and the second target nucleic acid sequence are present in different target nucleic acid molecules or a portion thereof. In one embodiment, region W connects the 3′-end of sequence Y′ with the 3′-end of sequence Y. In one embodiment, region W connects the 3′-end of sequence Y′ with the 5′-end of sequence Y. In one embodiment, region W connects the 5′-end of sequence Y′ with the 5′-end of sequence Y. In one embodiment, region W connects the 5′-end of sequence Y′ with the 3′-end of sequence Y. In one embodiment, a terminal phosphate group is present at the 5′-end of sequence X. In one embodiment, a terminal phosphate group is present at the 5′-end of sequence X′. In one embodiment, a terminal phosphate group is present at the 5′-end of sequence Y. In one embodiment, a terminal phosphate group is present at the 5′-end of sequence Y′. In one embodiment, W connects sequences Y and Y′ via a biodegradable linker. In one embodiment, W further comprises a conjugate, label, aptamer, ligand, lipid, or polymer.

[0367] In one embodiment, a multifunctional siNA molecule of the invention comprises a structure having Formula MF-V:
XX′
Y′—W—Y
wherein each X, X′, Y, and Y′ is independently an oligonucleotide of length of about 15 nucleotides to about 50 nucleotides, preferably about 18 to about 40 nucleotides, or about 19 to about 23 nucleotides; X comprises nucleotide sequence that is complementary to nucleotide sequence present in region Y′; X′ comprises nucleotide sequence that is complementary to nucleotide sequence present in region Y; each X, X′, Y, or Y′ is independently of length sufficient to stably interact (i.e., base pair) with a first, second, third, or fourth target nucleic acid sequence, respectively, or a portion thereof; W represents a nucleotide or non-nucleotide linker that connects sequences Y′ and Y; and the multifunctional siNA directs cleavage of the first, second, third, and/or fourth target sequence via RNA interference. In one embodiment, the first, second, third and fourth target nucleic acid sequence are all present in the same target nucleic acid molecule (e.g., target RNA). In another embodiment, the first, second, third and fourth target nucleic acid sequence are independently present in different target nucleic acid molecules or a portion thereof. In one embodiment, region W connects the 3′-end of sequence Y′ with the 3′-end of sequence Y. In one embodiment, region W connects the 3′-end of sequence Y′ with the 5′-end of sequence Y. In one embodiment, region W connects the 5′-end of sequence Y′ with the 5′-end of sequence Y. In one embodiment, region W connects the 5′-end of sequence Y′ with the 3′-end of sequence Y. In one embodiment, a terminal phosphate group is present at the 5′-end of sequence X. In one embodiment, a terminal phosphate group is present at the 5′-end of sequence X′. In one embodiment, a terminal phosphate group is present at the 5′-end of sequence Y. In one embodiment, a terminal phosphate group is present at the 5′-end of sequence Y′. In one embodiment, W connects sequences Y and Y′ via a biodegradable linker. In one embodiment, W further comprises a conjugate, label, aptamer, ligand, lipid, or polymer.

[0368] In one embodiment, regions X and Y of multifunctional siNA molecule of the invention (e.g., having any of Formula MF-I-MF-V), are complementary to different target nucleic acid sequences that are portions of the same target nucleic acid molecule. In one embodiment, such target nucleic acid sequences are at different locations within the coding region of a RNA transcript. In one embodiment, such target nucleic acid sequences comprise coding and non-coding regions of the same RNA transcript. In one embodiment, such target nucleic acid sequences comprise regions of alternately spliced transcripts or precursors of such alternately spliced transcripts.

[0369] In one embodiment, a multifunctional siNA molecule having any of Formula MF-I-MF-V can comprise chemical modifications as described herein without limitation, such as, for example, nucleotides having any of Formulae I-VII described herein, stabilization chemistries as described in Table IV, or any other combination of modified nucleotides and non-nucleotides as described in the various embodiments herein.

[0370] In one embodiment, the palidrome or repeat sequence or modified nucleotide (e.g., nucleotide with a modified base, such as 2-amino purine or a universal base) in Z of multifunctional siNA constructs having Formula MF-I or MF-II comprises chemically modified nucleotides that are able to interact with a portion of the target nucleic acid sequence (e.g., modified base analogs that can form Watson Crick base pairs or non-Watson Crick base pairs).

[0371] In one embodiment, a multifunctional siNA molecule of the invention, for example each strand of a multifunctional siNA having MF-I-MF-V, independently comprises about 15 to about 40 nucleotides (e.g., about 15, 16, 17, 18, 19, 20, 21, 22, 23, 24, 25, 26, 27, 28, 29, 30, 31, 32, 33, 34, 35, 36, 37, 38, 39, or 40 nucleotides). In one embodiment, a multifunctional siNA molecule of the invention comprises one or more chemical modifications. In a non-limiting example, the introduction of chemically modified nucleotides and/or non-nucleotides into nucleic acid molecules of the invention provides a powerful tool in overcoming potential limitations of in vivo stability and bioavailability inherent to unmodified RNA molecules that are delivered exogenously. For example, the use of chemically modified nucleic acid molecules can enable a lower dose of a particular nucleic acid molecule for a given therapeutic effect since chemically modified nucleic acid molecules tend to have a longer half-life in serum or in cells or tissues. Furthermore, certain chemical modifications can improve the bioavailability and/or potency of nucleic acid molecules by not only enhancing half-life but also facilitating the targeting of nucleic acid molecules to particular organs, cells or tissues and/or improving cellular uptake of the nucleic acid molecules. Therefore, even if the activity of a chemically modified nucleic acid molecule is reduced in vitro as compared to a native/unmodified nucleic acid molecule, for example when compared to an unmodified RNA molecule, the overall activity of the modified nucleic acid molecule can be greater than the native or unmodified nucleic acid molecule due to improved stability, potency, duration of effect, bioavailability and/or delivery of the molecule.

[0372] In another embodiment, the invention features multifunctional siNAs, wherein the multifunctional siNAs are assembled from two separate double-stranded siNAs, where one of the ends of each sense strand is tethered to the end of the sense strand of the other siNA molecule, such that the two antisense siNA strands are annealed to their corresponding sense strand that are tethered to each other at one end (see FIG. 22). The tethers or linkers can be nucleotide-based linkers or non-nucleotide based linkers as generally known in the art and as described herein.

[0373] In one embodiment, the invention features a multifunctional siNA, wherein the multifunctional siNA is assembled from two separate double-stranded siNAs, where the 5′-end of one sense strand of the siNA is tethered to the 5′-end of the sense strand of the other siNA molecule, such that the 5′-ends of the two antisense siNA strands, annealed to their corresponding sense strand that are tethered to each other at one end, point away (in the opposite direction) from each other (see FIG. 22 (A)). The tethers or linkers can be nucleotide-based linkers or non-nucleotide based linkers as generally known in the art and as described herein.

[0374] In one embodiment, the invention features a multifunctional siNA, wherein the multifunctional siNA is assembled from two separate double-stranded siNAs, where the 3′-end of one sense strand of the siNA is tethered to the 3′-end of the sense strand of the other siNA molecule, such that the 5′-ends of the two antisense siNA strands, annealed to their corresponding sense strand that are tethered to each other at one end, face each other (see FIG. 22 (B)). The tethers or linkers can be nucleotide-based linkers or non-nucleotide based linkers as generally known in the art and as described herein.

[0375] In one embodiment, the invention features a multifunctional siNA, wherein the multifunctional siNA is assembled from two separate double-stranded siNAs, where the 5′-end of one sense strand of the siNA is tethered to the 3′-end of the sense strand of the other siNA molecule, such that the 5′-end of the one of the antisense siNA strands annealed to their corresponding sense strand that are tethered to each other at one end, faces the 3′-end of the other antisense strand (see FIG. 22 (C-D)). The tethers or linkers can be nucleotide-based linkers or non-nucleotide based linkers as generally known in the art and as described herein.

[0376] In one embodiment, the invention features a multifunctional siNA, wherein the multifunctional siNA is assembled from two separate double-stranded siNAs, where the 5′-end of one antisense strand of the siNA is tethered to the 3′-end of the antisense strand of the other siNA molecule, such that the 5′-end of the one of the sense siNA strands annealed to their corresponding antisense sense strand that are tethered to each other at one end, faces the 3′-end of the other sense strand (see FIG. 22 (G-H)). In one embodiment, the linkage between the 5′-end of the first antisense strand and the 3′-end of the second antisense strand is designed in such a way as to be readily cleavable (e.g., biodegradable linker) such that the 5′end of each antisense strand of the multifunctional siNA has a free 5′-end suitable to mediate RNA interefence-based cleavage of the target RNA. The tethers or linkers can be nucleotide-based linkers or non-nucleotide based linkers as generally known in the art and as described herein.

[0377] In one embodiment, the invention features a multifunctional siNA, wherein the multifunctional siNA is assembled from two separate double-stranded siNAs, where the 5′-end of one antisense strand of the siNA is tethered to the 5′-end of the antisense strand of the other siNA molecule, such that the 3′-end of the one of the sense siNA strands annealed to their corresponding antisense sense strand that are tethered to each other at one end, faces the 3′-end of the other sense strand (see FIG. 22 (E)). In one embodiment, the linkage between the 5′-end of the first antisense strand and the 5′-end of the second antisense strand is designed in such a way as to be readily cleavable (e.g., biodegradable linker) such that the 5′end of each antisense strand of the multifunctional siNA has a free 5′-end suitable to mediate RNA interefence-based cleavage of the target RNA. The tethers or linkers can be nucleotide-based linkers or non-nucleotide based linkers as generally known in the art and as described herein.

[0378] In one embodiment, the invention features a multifunctional siNA, wherein the multifunctional siNA is assembled from two separate double-stranded siNAs, where the 3′-end of one antisense strand of the siNA is tethered to the 3′-end of the antisense strand of the other siNA molecule, such that the 5′-end of the one of the sense siNA strands annealed to their corresponding antisense sense strand that are tethered to each other at one end, faces the 3′-end of the other sense strand (see FIG. 22 (F)). In one embodiment, the linkage between the 5′-end of the first antisense strand and the 5′-end of the second antisense strand is designed in such a way as to be readily cleavable (e.g., biodegradable linker) such that the 5′end of each antisense strand of the multifunctional siNA has a free 5′-end suitable to mediate RNA interefence-based cleavage of the target RNA. The tethers or linkers can be nucleotide-based linkers or non-nucleotide based linkers as generally known in the art and as described herein.

[0379] In any of the above embodiments, a first target nucleic acid sequence or second target nucleic acid sequence can independently comprise target RNA, DNA or a portion thereof. In one embodiment, the first target nucleic acid sequence is a target RNA, DNA or a portion thereof and the second target nucleic acid sequence is a target RNA, DNA of a portion thereof. In one embodiment, the first target nucleic acid sequence is a target RNA, DNA or a portion thereof and the second target nucleic acid sequence is another RNA, DNA of a portion thereof.

Synthesis of Nucleic Acid Molecules

[0380] Synthesis of nucleic acids greater than 100 nucleotides in length is difficult using automated methods, and the therapeutic cost of such molecules is prohibitive. In this invention, small nucleic acid motifs (“small” refers to nucleic acid motifs no more than 100 nucleotides in length, preferably no more than 80 nucleotides in length, and most preferably no more than 50 nucleotides in length; e.g., individual siNA oligonucleotide sequences or siNA sequences synthesized in tandem) are preferably used for exogenous delivery. The simple structure of these molecules increases the ability of the nucleic acid to invade targeted regions of protein and/or RNA structure. Exemplary molecules of the instant invention are chemically synthesized, and others can similarly be synthesized.

[0381] Oligonucleotides (e.g., certain modified oligonucleotides or portions of oligonucleotides lacking ribonucleotides) are synthesized using protocols known in the art, for example as described in Caruthers et al., 1992, Methods in Enzymology 211, 3-19, Thompson et al., International PCT Publication No. WO 99/54459, Wincott et al., 1995, Nucleic Acids Res. 23, 2677-2684, Wincott et al., 1997, Methods Mol. Bio., 74, 59, Brennan et al., 1998, Biotechnol Bioeng., 61, 33-45, and Brennan, U.S. Pat. No. 6,001,311. All of these references are incorporated herein by reference. The synthesis of oligonucleotides makes use of common nucleic acid protecting and coupling groups, such as dimethoxytrityl at the 5′-end, and phosphoramidites at the 3′-end. In a non-limiting example, small scale syntheses are conducted on a 394 Applied Biosystems, Inc. synthesizer using a 0.2 μmol scale protocol with a 2.5 min coupling step for 2′-O-methylated nucleotides and a 45 second coupling step for 2′-deoxy nucleotides or 2′-deoxy-2′-fluoro nucleotides. Table V outlines the amounts and the contact times of the reagents used in the synthesis cycle. Alternatively, syntheses at the 0.2 μmol scale can be performed on a 96-well plate synthesizer, such as the instrument produced by Protogene (Palo Alto, Calif.) with minimal modification to the cycle. A 33-fold excess (60 μL of 0.11 M=6.6 μmol) of 2′-O-methyl phosphoramidite and a 105-fold excess of S-ethyl tetrazole (60 μL of 0.25 M=15 μmol) can be used in each coupling cycle of 2′-O-methyl residues relative to polymer-bound 5′-hydroxyl. A 22-fold excess (40 μL of 0.11 M=4.4 μmol) of deoxy phosphoramidite and a 70-fold excess of S-ethyl tetrazole (40 μL of 0.25 M=10 μmol) can be used in each coupling cycle of deoxy residues relative to polymer-bound 5′-hydroxyl. Average coupling yields on the 394 Applied Biosystems, Inc. synthesizer, determined by colorimetric quantitation of the trityl fractions, are typically 97.5-99%. Other oligonucleotide synthesis reagents for the 394 Applied Biosystems, Inc. synthesizer include the following: detritylation solution is 3% TCA in methylene chloride (ABI); capping is performed with 16% N-methyl imidazole in THF (ABI) and 10% acetic anhydride/10% 2,6-lutidine in THF (ABI); and oxidation solution is 16.9 mM I₂, 49 mM pyridine, 9% water in THF (PerSeptive Biosystems, Inc.). Burdick & Jackson Synthesis Grade acetonitrile is used directly from the reagent bottle. S-Ethyltetrazole solution (0.25 M in acetonitrile) is made up from the solid obtained from American International Chemical, Inc. Alternately, for the introduction of phosphorothioate linkages, Beaucage reagent (3H-1,2-Benzodithiol-3-one 1,1-dioxide, 0.05 M in acetonitrile) is used.

[0382] Deprotection of the DNA-based oligonucleotides is performed as follows: the polymer-bound trityl-on oligoribonucleotide is transferred to a 4 mL glass screw top vial and suspended in a solution of 40% aqueous methylamine (1 mL) at 65° C. for 10 minutes. After cooling to −20° C., the supernatant is removed from the polymer support. The support is washed three times with 1.0 mL of EtOH:MeCN:H2O/3:1:1, vortexed and the supernatant is then added to the first supernatant. The combined supernatants, containing the oligoribonucleotide, are dried to a white powder.

[0383] The method of synthesis used for RNA including certain siNA molecules of the invention follows the procedure as described in Usman et al., 1987, J. Am. Chem. Soc., 109, 7845; Scaringe et al., 1990, Nucleic Acids Res., 18, 5433; and Wincott et al., 1995, Nucleic Acids Res. 23, 2677-2684 Wincott et al., 1997, Methods Mol. Bio., 74, 59, and makes use of common nucleic acid protecting and coupling groups, such as dimethoxytrityl at the 5′-end, and phosphoramidites at the 3′-end. In a non-limiting example, small scale syntheses are conducted on a 394 Applied Biosystems, Inc. synthesizer using a 0.2 μmol scale protocol with a 7.5 min coupling step for alkylsilyl protected nucleotides and a 2.5 min coupling step for 2′-O-methylated nucleotides. Table V outlines the amounts and the contact times of the reagents used in the synthesis cycle. Alternatively, syntheses at the 0.2 μmol scale can be done on a 96-well plate synthesizer, such as the instrument produced by Protogene (Palo Alto, Calif.) with minimal modification to the cycle. A 33-fold excess (60 μL of 0.11 M=6.6 μmol) of 2′-O-methyl phosphoramidite and a 75-fold excess of S-ethyl tetrazole (60 μL of 0.25 M=15 μmol) can be used in each coupling cycle of 2′-O-methyl residues relative to polymer-bound 5′-hydroxyl. A 66-fold excess (120 μL of 0.11 M=13.2 μmol) of alkylsilyl (ribo) protected phosphoramidite and a 150-fold excess of S-ethyl tetrazole (120 μL of 0.25 M=30 μmol) can be used in each coupling cycle of ribo residues relative to polymer-bound 5′-hydroxyl. Average coupling yields on the 394 Applied Biosystems, Inc. synthesizer, determined by colorimetric quantitation of the trityl fractions, are typically 97.5-99%. Other oligonucleotide synthesis reagents for the 394 Applied Biosystems, Inc. synthesizer include the following: detritylation solution is 3% TCA in methylene chloride (ABI); capping is performed with 16% N-methyl imidazole in THF (ABI) and 10% acetic anhydride/10% 2,6-lutidine in THF (ABI); oxidation solution is 16.9 mM I₂, 49 mM pyridine, 9% water in THF (PerSeptive Biosystems, Inc.). Burdick & Jackson Synthesis Grade acetonitrile is used directly from the reagent bottle. S-Ethyltetrazole solution (0.25 M in acetonitrile) is made up from the solid obtained from American International Chemical, Inc. Alternately, for the introduction of phosphorothioate linkages, Beaucage reagent (3H-1,2-Benzodithiol-3-one 1,1-dioxide 0.05 M in acetonitrile) is used.

[0384] Deprotection of the RNA is performed using either a two-pot or one-pot protocol. For the two-pot protocol, the polymer-bound trityl-on oligoribonucleotide is transferred to a 4 mL glass screw top vial and suspended in a solution of 40% aq. methylamine (1 mL) at 65° C. for 10 min. After cooling to −20° C., the supernatant is removed from the polymer support. The support is washed three times with 1.0 mL of EtOH:MeCN:H2O/3:1:1, vortexed and the supernatant is then added to the first supernatant. The combined supernatants, containing the oligoribonucleotide, are dried to a white powder. The base deprotected oligoribonucleotide is resuspended in anhydrous TEA/HF/NMP solution (300 μL of a solution of 1.5 mL N-methylpyrrolidinone, 750 μL TEA and 1 mL TEA.3HF to provide a 1.4 M HF concentration) and heated to 65° C. After 1.5 h, the oligomer is quenched with 1.5 M NH₄HCO₃.

[0385] Alternatively, for the one-pot protocol, the polymer-bound trityl-on oligoribonucleotide is transferred to a 4 mL glass screw top vial and suspended in a solution of 33% ethanolic methylamine/DMSO: 1/1 (0.8 mL) at 65° C. for 15 minutes. The vial is brought to room temperature TEA.3HF (0.1 mL) is added and the vial is heated at 65° C. for 15 minutes. The sample is cooled at −20° C. and then quenched with 1.5 M NH₄HCO₃.

[0386] For purification of the trityl-on oligomers, the quenched NH₄HCO₃ solution is loaded onto a C-18 containing cartridge that had been prewashed with acetonitrile followed by 50 mM TEAA. After washing the loaded cartridge with water, the RNA is detritylated with 0.5% TFA for 13 minutes. The cartridge is then washed again with water, salt exchanged with 1 M NaCl and washed with water again. The oligonucleotide is then eluted with 30% acetonitrile.

[0387] The average stepwise coupling yields are typically >98% (Wincott et al., 1995 Nucleic Acids Res. 23, 2677-2684). Those of ordinary skill in the art will recognize that the scale of synthesis can be adapted to be larger or smaller than the example described above including but not limited to 96-well format.

[0388] Alternatively, the nucleic acid molecules of the present invention can be synthesized separately and joined together post-synthetically, for example, by ligation (Moore et al., 1992, Science 256, 9923; Draper et al., International PCT publication No. WO 93/23569; Shabarova et al., 1991, Nucleic Acids Research 19, 4247; Bellon et al., 1997, Nucleosides & Nucleotides, 16, 951; Bellon et al., 1997, Bioconjugate Chem. 8, 204), or by hybridization following synthesis and/or deprotection.

[0389] The siNA molecules of the invention can also be synthesized via a tandem synthesis methodology as described in Example 1 herein, wherein both siNA strands are synthesized as a single contiguous oligonucleotide fragment or strand separated by a cleavable linker which is subsequently cleaved to provide separate siNA fragments or strands that hybridize and permit purification of the siNA duplex. The linker can be a polynucleotide linker or a non-nucleotide linker. The tandem synthesis of siNA as described herein can be readily adapted to both multiwell/multiplate synthesis platforms such as 96 well or similarly larger multi-well platforms. The tandem synthesis of siNA as described herein can also be readily adapted to large scale synthesis platforms employing batch reactors, synthesis columns and the like.

[0390] A siNA molecule can also be assembled from two distinct nucleic acid strands or fragments wherein one fragment includes the sense region and the second fragment includes the antisense region of the RNA molecule.

[0391] The nucleic acid molecules of the present invention can be modified extensively to enhance stability by modification with nuclease resistant groups, for example, 2′-amino, 2′-C-allyl, 2′-fluoro, 2′-O-methyl, 2′-H (for a review see Usman and Cedergren, 1992, TIBS 17, 34; Usman et al., 1994, Nucleic Acids Symp. Ser. 31, 163). siNA constructs can be purified by gel electrophoresis using general methods or can be purified by high pressure liquid chromatography (HPLC; see Wincott et al., supra, the totality of which is hereby incorporated herein by reference) and re-suspended in water.

[0392] In another aspect of the invention, siNA molecules of the invention are expressed from transcription units inserted into DNA or RNA vectors. The recombinant vectors can be DNA plasmids or viral vectors. siNA expressing viral vectors can be constructed based on, but not limited to, adeno-associated virus, retrovirus, adenovirus, or alphavirus. The recombinant vectors capable of expressing the siNA molecules can be delivered as described herein, and persist in target cells. Alternatively, viral vectors can be used that provide for transient expression of siNA molecules.

Optimizing Activity of the Nucleic Acid Molecule of the Invention.

[0393] Chemically synthesizing nucleic acid molecules with modifications (base, sugar and/or phosphate) can prevent their degradation by serum ribonucleases, which can increase their potency (see e.g., Eckstein et al., International Publication No. WO 92/07065; Perrault et al., 1990 Nature 344, 565; Pieken et al., 1991, Science 253, 314; Usman and Cedergren, 1992, Trends in Biochem. Sci. 17, 334; Usman et al., International Publication No. WO 93/15187; and Rossi et al., International Publication No. WO 91/03162; Sproat, U.S. Pat. No. 5,334,711; Gold et al., U.S. Pat. No. 6,300,074; and Burgin et al., supra; all of which are incorporated by reference herein). All of the above references describe various chemical modifications that can be made to the base, phosphate and/or sugar moieties of the nucleic acid molecules described herein. Modifications that enhance their efficacy in cells, and removal of bases from nucleic acid molecules to shorten oligonucleotide synthesis times and reduce chemical requirements are desired.

[0394] There are several examples in the art describing sugar, base and phosphate modifications that can be introduced into nucleic acid molecules with significant enhancement in their nuclease stability and efficacy. For example, oligonucleotides are modified to enhance stability and/or enhance biological activity by modification with nuclease resistant groups, for example, 2′-amino, 2′-C-allyl, 2′-fluoro, 2′-O-methyl, 2′-O-allyl, 2′-H, nucleotide base modifications (for a review see Usman and Cedergren, 1992, TIBS. 17, 34; Usman et al., 1994, Nucleic Acids Symp. Ser. 31, 163; Burgin et al., 1996, Biochemistry, 35, 14090). Sugar modification of nucleic acid molecules have been extensively described in the art (see Eckstein et al., International Publication PCT No. WO 92/07065; Perrault et al. Nature, 1990, 344, 565-568; Pieken et al. Science, 1991, 253, 314-317; Usman and Cedergren, Trends in Biochem. Sci., 1992, 17, 334-339; Usman et al. International Publication PCT No. WO 93/15187; Sproat, U.S. Pat. No. 5,334,711 and Beigelman et al., 1995, J. Biol. Chem., 270, 25702; Beigelman et al., International PCT publication No. WO 97/26270; Beigelman et al., U.S. Pat. No. 5,716,824; Usman et al., U.S. Pat. No. 5,627,053; Woolf et al., International PCT Publication No. WO 98/13526; Thompson et al., U.S. Ser. No. 60/082,404 which was filed on Apr. 20, 1998; Karpeisky et al., 1998, Tetrahedron Lett., 39, 1131; Earnshaw and Gait, 1998, Biopolymers (Nucleic Acid Sciences), 48, 39-55; Verma and Eckstein, 1998, Annu. Rev. Biochem., 67, 99-134; and Burlina et al., 1997, Bioorg. Med. Chem., 5, 1999-2010; all of the references are hereby incorporated in their totality by reference herein). Such publications describe general methods and strategies to determine the location of incorporation of sugar, base and/or phosphate modifications and the like into nucleic acid molecules without modulating catalysis, and are incorporated by reference herein. In view of such teachings, similar modifications can be used as described herein to modify the siNA nucleic acid molecules of the instant invention so long as the ability of siNA to promote RNAi is cells is not significantly inhibited.

[0395] While chemical modification of oligonucleotide internucleotide linkages with phosphorothioate, phosphorodithioate, and/or 5′-methylphosphonate linkages improves stability, excessive modifications can cause some toxicity or decreased activity. Therefore, when designing nucleic acid molecules, the amount of these internucleotide linkages should be minimized. The reduction in the concentration of these linkages should lower toxicity, resulting in increased efficacy and higher specificity of these molecules.

[0396] Short interfering nucleic acid (siNA) molecules having chemical modifications that maintain or enhance activity are provided. Such a nucleic acid is also generally more resistant to nucleases than an unmodified nucleic acid. Accordingly, the in vitro and/or in vivo activity should not be significantly lowered. In cases in which modulation is the goal, therapeutic nucleic acid molecules delivered exogenously should optimally be stable within cells until translation of the target RNA has been modulated long enough to reduce the levels of the undesirable protein. This period of time varies between hours to days depending upon the disease state. Improvements in the chemical synthesis of RNA and DNA (Wincott et al., 1995, Nucleic Acids Res. 23, 2677; Caruthers et al., 1992, Methods in Enzymology 211, 3-19 (incorporated by reference herein)) have expanded the ability to modify nucleic acid molecules by introducing nucleotide modifications to enhance their nuclease stability, as described above.

[0397] In one embodiment, nucleic acid molecules of the invention include one or more (e.g., about 1, 2, 3, 4, 5, 6, 7, 8, 9, 10, or more) G-clamp nucleotides. A G-clamp nucleotide is a modified cytosine analog wherein the modifications confer the ability to hydrogen bond both Watson-Crick and Hoogsteen faces of a complementary guanine within a duplex, see for example Lin and Matteucci, 1998, J. Am. Chem. Soc., 120, 8531-8532. A single G-clamp analog substitution within an oligonucleotide can result in substantially enhanced helical thermal stability and mismatch discrimination when hybridized to complementary oligonucleotides. The inclusion of such nucleotides in nucleic acid molecules of the invention results in both enhanced affinity and specificity to nucleic acid targets, complementary sequences, or template strands. In another embodiment, nucleic acid molecules of the invention include one or more (e.g., about 1, 2, 3, 4, 5, 6, 7, 8, 9, 10, or more) LNA “locked nucleic acid” nucleotides such as a 2′,4′-C methylene bicyclo nucleotide (see for example Wengel et al., International PCT Publication No. WO 00/66604 and WO 99/14226).

[0398] In another embodiment, the invention features conjugates and/or complexes of siNA molecules of the invention. Such conjugates and/or complexes can be used to facilitate delivery of siNA molecules into a biological system, such as a cell. The conjugates and complexes provided by the instant invention can impart therapeutic activity by transferring therapeutic compounds across cellular membranes, altering the pharmacokinetics, and/or modulating the localization of nucleic acid molecules of the invention. The present invention encompasses the design and synthesis of novel conjugates and complexes for the delivery of molecules, including, but not limited to, small molecules, lipids, cholesterol, phospholipids, nucleosides, nucleotides, nucleic acids, antibodies, toxins, negatively charged polymers and other polymers, for example proteins, peptides, hormones, carbohydrates, polyethylene glycols, or polyamines, across cellular membranes. In general, the transporters described are designed to be used either individually or as part of a multi-component system, with or without degradable linkers. These compounds are expected to improve delivery and/or localization of nucleic acid molecules of the invention into a number of cell types originating from different tissues, in the presence or absence of serum (see Sullenger and Cech, U.S. Pat. No. 5,854,038). Conjugates of the molecules described herein can be attached to biologically active molecules via linkers that are biodegradable, such as biodegradable nucleic acid linker molecules.

[0399] The term “biodegradable linker” as used herein, refers to a nucleic acid or non-nucleic acid linker molecule that is designed as a biodegradable linker to connect one molecule to another molecule, for example, a biologically active molecule to a siNA molecule of the invention or the sense and antisense strands of a siNA molecule of the invention. The biodegradable linker is designed such that its stability can be modulated for a particular purpose, such as delivery to a particular tissue or cell type. The stability of a nucleic acid-based biodegradable linker molecule can be modulated by using various chemistries, for example combinations of ribonucleotides, deoxyribonucleotides, and chemically-modified nucleotides, such as 2′-O-methyl, 2′-fluoro, 2′-amino, 2′-O-amino, 2′-C-allyl, 2′-O-allyl, and other 2′-modified or base modified nucleotides. The biodegradable nucleic acid linker molecule can be a dimer, trimer, tetramer or longer nucleic acid molecule, for example, an oligonucleotide of about 2, 3, 4, 5, 6, 7, 8, 9, 10, 11, 12, 13, 14, 15, 16, 17, 18, 19, or 20 nucleotides in length, or can comprise a single nucleotide with a phosphorus-based linkage, for example, a phosphoramidate or phosphodiester linkage. The biodegradable nucleic acid linker molecule can also comprise nucleic acid backbone, nucleic acid sugar, or nucleic acid base modifications.

[0400] The term “biodegradable” as used herein, refers to degradation in a biological system, for example, enzymatic degradation or chemical degradation.

[0401] The term “biologically active molecule” as used herein refers to compounds or molecules that are capable of eliciting or modifying a biological response in a system. Non-limiting examples of biologically active siNA molecules either alone or in combination with other molecules contemplated by the instant invention include therapeutically active molecules such as antibodies, cholesterol, hormones, antivirals, peptides, proteins, chemotherapeutics, small molecules, vitamins, co-factors, nucleosides, nucleotides, oligonucleotides, enzymatic nucleic acids, antisense nucleic acids, triplex forming oligonucleotides, 2,5-A chimeras, siNA, dsRNA, allozymes, aptamers, decoys and analogs thereof. Biologically active molecules of the invention also include molecules capable of modulating the pharmacokinetics and/or pharmacodynamics of other biologically active molecules, for example, lipids and polymers such as polyamines, polyamides, polyethylene glycol and other polyethers.

[0402] The term “phospholipid” as used herein, refers to a hydrophobic molecule comprising at least one phosphorus group. For example, a phospholipid can comprise a phosphorus-containing group and saturated or unsaturated alkyl group, optionally substituted with OH, COOH, oxo, amine, or substituted or unsubstituted aryl groups.

[0403] Therapeutic nucleic acid molecules (e.g., siNA molecules) delivered exogenously optimally are stable within cells until reverse transcription of the RNA has been modulated long enough to reduce the levels of the RNA transcript. The nucleic acid molecules are resistant to nucleases in order to function as effective intracellular therapeutic agents. Improvements in the chemical synthesis of nucleic acid molecules described in the instant invention and in the art have expanded the ability to modify nucleic acid molecules by introducing nucleotide modifications to enhance their nuclease stability as described above.

[0404] In yet another embodiment, siNA molecules having chemical modifications that maintain or enhance enzymatic activity of proteins involved in RNAi are provided. Such nucleic acids are also generally more resistant to nucleases than unmodified nucleic acids. Thus, in vitro and/or in vivo the activity should not be significantly lowered.

[0405] Use of the nucleic acid-based molecules of the invention will lead to better treatments by affording the possibility of combination therapies (e.g., multiple siNA molecules targeted to different genes; nucleic acid molecules coupled with known small molecule modulators; or intermittent treatment with combinations of molecules, including different motifs and/or other chemical or biological molecules). The treatment of subjects with siNA molecules can also include combinations of different types of nucleic acid molecules, such as enzymatic nucleic acid molecules (ribozymes), allozymes, antisense, 2,5-A oligoadenylate, decoys, and aptamers.

[0406] In another aspect a siNA molecule of the invention comprises one or more 5′ and/or a 3′-cap structure, for example, on only the sense siNA strand, the antisense siNA strand, or both siNA strands.

[0407] By “cap structure” is meant chemical modifications, which have been incorporated at either terminus of the oligonucleotide (see, for example, Adamic et al., U.S. Pat. No. 5,998,203, incorporated by reference herein). These terminal modifications protect the nucleic acid molecule from exonuclease degradation, and may help in delivery and/or localization within a cell. The cap may be present at the 5′-terminus (5′-cap) or at the 3′-terminal (3′-cap) or may be present on both termini. In non-limiting examples, the 5′-cap includes, but is not limited to, glyceryl, inverted deoxy abasic residue (moiety); 4′,5′-methylene nucleotide; 1-(beta-D-erythrofuranosyl) nucleotide, 4′-thio nucleotide; carbocyclic nucleotide; 1,5-anhydrohexitol nucleotide; L-nucleotides; alpha-nucleotides; modified base nucleotide; phosphorodithioate linkage; threo-pentofuranosyl nucleotide; acyclic 3′,4′-seco nucleotide; acyclic 3,4-dihydroxybutyl nucleotide; acyclic 3,5-dihydroxypentyl nucleotide, 3′-3′-inverted nucleotide moiety; 3′-3′-inverted abasic moiety; 3′-2′-inverted nucleotide moiety; 3′-2′-inverted abasic moiety; 1,4-butanediol phosphate; 3′-phosphoramidate; hexylphosphate; aminohexyl phosphate; 3′-phosphate; 3′-phosphorothioate; phosphorodithioate; or bridging or non-bridging methylphosphonate moiety. Non-limiting examples of cap moieties are shown in FIG. 10.

[0408] Non-limiting examples of the 3′-cap include, but are not limited to, glyceryl, inverted deoxy abasic residue (moiety), 4′,5′-methylene nucleotide; 1-(beta-D-erythrofuranosyl) nucleotide; 4′-thio nucleotide, carbocyclic nucleotide; 5′-amino-alkyl phosphate; 1,3-diamino-2-propyl phosphate; 3-aminopropyl phosphate; 6-aminohexyl phosphate; 1,2-aminododecyl phosphate; hydroxypropyl phosphate; 1,5-anhydrohexitol nucleotide; L-nucleotide; alpha-nucleotide; modified base nucleotide; phosphorodithioate; threo-pentofuranosyl nucleotide; acyclic 3′,4′-seco nucleotide; 3,4-dihydroxybutyl nucleotide; 3,5-dihydroxypentyl nucleotide, 5′-5′-inverted nucleotide moiety; 5′-5′-inverted abasic moiety; 5′-phosphoramidate; 5′-phosphorothioate; 1,4-butanediol phosphate; 5′-amino; bridging and/or non-bridging 5′-phosphoramidate, phosphorothioate and/or phosphorodithioate, bridging or non bridging methylphosphonate and 5′-mercapto moieties (for more details see Beaucage and Iyer, 1993, Tetrahedron 49, 1925; incorporated by reference herein).

[0409] By the term “non-nucleotide” is meant any group or compound which can be incorporated into a nucleic acid chain in the place of one or more nucleotide units, including either sugar and/or phosphate substitutions, and allows the remaining bases to exhibit their enzymatic activity. The group or compound is abasic in that it does not contain a commonly recognized nucleotide base, such as adenosine, guanine, cytosine, uracil or thymine and therefore lacks a base at the 1′-position.

[0410] An “alkyl” group refers to a saturated aliphatic hydrocarbon, including straight-chain, branched-chain, and cyclic alkyl groups. Preferably, the alkyl group has 1 to 12 carbons. More preferably, it is a lower alkyl of from 1 to 7 carbons, more preferably 1 to 4 carbons. The alkyl group can be substituted or unsubstituted. When substituted the substituted group(s) is preferably, hydroxyl, cyano, alkoxy, ═O, ═S, NO₂ or N(CH₃)₂, amino, or SH. The term also includes alkenyl groups that are unsaturated hydrocarbon groups containing at least one carbon-carbon double bond, including straight-chain, branched-chain, and cyclic groups. Preferably, the alkenyl group has 1 to 12 carbons. More preferably, it is a lower alkenyl of from 1 to 7 carbons, more preferably 1 to 4 carbons. The alkenyl group may be substituted or unsubstituted. When substituted the substituted group(s) is preferably, hydroxyl, cyano, alkoxy, ═O, ═S, NO₂, halogen, N(CH₃)₂, amino, or SH. The term “alkyl” also includes alkynyl groups that have an unsaturated hydrocarbon group containing at least one carbon-carbon triple bond, including straight-chain, branched-chain, and cyclic groups. Preferably, the alkynyl group has 1 to 12 carbons. More preferably, it is a lower alkynyl of from 1 to 7 carbons, more preferably 1 to 4 carbons. The alkynyl group may be substituted or unsubstituted. When substituted the substituted group(s) is preferably, hydroxyl, cyano, alkoxy, ═O, ═S, NO₂ or N(CH₃)₂, amino or SH.

[0411] Such alkyl groups can also include aryl, alkylaryl, carbocyclic aryl, heterocyclic aryl, amide and ester groups. An “aryl” group refers to an aromatic group that has at least one ring having a conjugated pi electron system and includes carbocyclic aryl, heterocyclic aryl and biaryl groups, all of which may be optionally substituted. The preferred substituent(s) of aryl groups are halogen, trihalomethyl, hydroxyl, SH, OH, cyano, alkoxy, alkyl, alkenyl, alkynyl, and amino groups. An “alkylaryl” group refers to an alkyl group (as described above) covalently joined to an aryl group (as described above). Carbocyclic aryl groups are groups wherein the ring atoms on the aromatic ring are all carbon atoms. The carbon atoms are optionally substituted. Heterocyclic aryl groups are groups having from 1 to 3 heteroatoms as ring atoms in the aromatic ring and the remainder of the ring atoms are carbon atoms. Suitable heteroatoms include oxygen, sulfur, and nitrogen, and include furanyl, thienyl, pyridyl, pyrrolyl, N-lower alkyl pyrrolo, pyrimidyl, pyrazinyl, imidazolyl and the like, all optionally substituted. An “amide” refers to an —C(O)—NH—R, where R is either alkyl, aryl, alkylaryl or hydrogen. An “ester” refers to an —C(O)—OR′, where R is either alkyl, aryl, alkylaryl or hydrogen.

[0412] By “nucleotide” as used herein is as recognized in the art to include natural bases (standard), and modified bases well known in the art. Such bases are generally located at the 1′ position of a nucleotide sugar moiety. Nucleotides generally comprise a base, sugar and a phosphate group. The nucleotides can be unmodified or modified at the sugar, phosphate and/or base moiety, (also referred to interchangeably as nucleotide analogs, modified nucleotides, non-natural nucleotides, non-standard nucleotides and other; see, for example, Usman and McSwiggen, supra; Eckstein et al., International PCT Publication No. WO 92/07065; Usman et al., International PCT Publication No. WO 93/15187; Uhlman & Peyman, supra, all are hereby incorporated by reference herein). There are several examples of modified nucleic acid bases known in the art as summarized by Limbach et al., 1994, Nucleic Acids Res. 22, 2183. Some of the non-limiting examples of base modifications that can be introduced into nucleic acid molecules include, inosine, purine, pyridin-4-one, pyridin-2-one, phenyl, pseudouracil, 2,4,6-trimethoxy benzene, 3-methyl uracil, dihydrouridine, naphthyl, aminophenyl, 5-alkylcytidines (e.g., 5-methylcytidine), 5-alkyluridines (e.g., ribothymidine), 5-halouridine (e.g., 5-bromouridine) or 6-azapyrimidines or 6-alkylpyrimidines (e.g. 6-methyluridine), propyne, and others (Burgin et al., 1996, Biochemistry, 35, 14090; Uhlman & Peyman, supra). By “modified bases” in this aspect is meant nucleotide bases other than adenine, guanine, cytosine and uracil at 1′ position or their equivalents.

[0413] In one embodiment, the invention features modified siNA molecules, with phosphate backbone modifications comprising one or more phosphorothioate, phosphorodithioate, methylphosphonate, phosphotriester, morpholino, amidate carbamate, carboxymethyl, acetamidate, polyamide, sulfonate, sulfonamide, sulfamate, formacetal, thioformacetal, and/or alkylsilyl, substitutions. For a review of oligonucleotide backbone modifications, see Hunziker and Leumann, 1995, Nucleic Acid Analogues: Synthesis and Properties, in Modern Synthetic Methods, VCH, 331-417, and Mesmaeker et al., 1994, Novel Backbone Replacements for Oligonucleotides, in Carbohydrate Modifications in Antisense Research, ACS, 24-39.

[0414] By “abasic” is meant sugar moieties lacking a nucleobase or having a hydrogen atom (H) or other other non-nucleobase chemical groups in place of a nucleobase at the 1′ position of the sugar moiety, see for example Adamic et al., U.S. Pat. No. 5,998,203. In one embodiment, an abasic moiety of the invention is a ribose, deoxyribose, or dideoxyribose sugar.

[0415] By “unmodified nucleoside” is meant one of the bases adenine, cytosine, guanine, thymine, or uracil joined to the 1′ carbon of β-D-ribo-furanose.

[0416] By “modified nucleoside” is meant any nucleotide base which contains a modification in the chemical structure of an unmodified nucleotide base, sugar and/or phosphate. Non-limiting examples of modified nucleotides are shown by Formulae I-VII and/or other modifications described herein.

[0417] In connection with 2′-modified nucleotides as described for the present invention, by “amino” is meant 2′-NH₂ or 2′-O—NH₂, which can be modified or unmodified. Such modified groups are described, for example, in Eckstein et al., U.S. Pat. No. 5,672,695 and Matulic-Adamic et al., U.S. Pat. No. 6,248,878, which are both incorporated by reference in their entireties.

[0418] Various modifications to nucleic acid siNA structure can be made to enhance the utility of these molecules. Such modifications will enhance shelf-life, half-life in vitro, stability, and ease of introduction of such oligonucleotides to the target site, e.g., to enhance penetration of cellular membranes, and confer the ability to recognize and bind to targeted cells.

Administration of Nucleic Acid Molecules

[0419] A siNA molecule of the invention can be adapted for use to prevent or treat diseases, traits, disorders, and/or conditions described herein or otherwise known in the art to be related to gene expression, and/or any other trait, disease, disorder or condition that is related to or will respond to the levels of a target polynucleotide or a protein expressed therefrom in a cell or tissue, alone or in combination with other therapies.

[0420] In one embodiment, a siNA composition of the invention can comprise a delivery vehicle, including liposomes, for administration to a subject, carriers and diluents and their salts, and/or can be present in pharmaceutically acceptable formulations. Methods for the delivery of nucleic acid molecules are described in Akhtar et al., 1992, Trends Cell Bio., 2, 139; Delivery Strategies for Antisense Oligonucleotide Therapeutics, ed. Akhtar, 1995, Maurer et al., 1999, Mol. Membr. Biol., 16, 129-140; Hofland and Huang, 1999, Handb. Exp. Pharmacol., 137, 165-192; and Lee et al., 2000, ACS Symp. Ser., 752, 184-192, all of which are incorporated herein by reference. Beigelman et al., U.S. Pat. No. 6,395,713 and Sullivan et al., PCT WO 94/02595 further describe the general methods for delivery of nucleic acid molecules. These protocols can be utilized for the delivery of virtually any nucleic acid molecule. Nucleic acid molecules can be administered to cells by a variety of methods known to those of skill in the art, including, but not restricted to, encapsulation in liposomes, by iontophoresis, or by incorporation into other vehicles, such as biodegradable polymers, hydrogels, cyclodextrins (see for example Gonzalez et al., 1999, Bioconjugate Chem., 10, 1068-1074; Wang et al., International PCT publication Nos. WO 03/47518 and WO 03/46185), poly(lactic-co-glycolic)acid (PLGA) and PLCA microspheres (see for example U.S. Pat. No. 6,447,796 and US Patent Application Publication No. US 2002130430), biodegradable nanocapsules, and bioadhesive microspheres, or by proteinaceous vectors (O'Hare and Normand, International PCT Publication No. WO 00/53722). In another embodiment, the nucleic acid molecules of the invention can also be formulated or complexed with polyethyleneimine and derivatives thereof, such as polyethyleneimine-polyethyleneglycol-N-acetylgalactosamine (PEI-PEG-GAL) or polyethyleneimine-polyethyleneglycol-tri-N-acetylgalactosamine (PEI-PEG-triGAL) derivatives. In one embodiment, the nucleic acid molecules of the invention are formulated as described in United States Patent Application Publication No. 20030077829, incorporated by reference herein in its entirety.

[0421] In one embodiment, a siNA molecule of the invention is formulated as a composition described in U.S. Provisional patent application No. 60/678,531 and in related U.S. Provisional patent application No. TBD, filed Jul. 29, 2005 (Vargeese et al.), both of which are incorporated by reference herein in their entirety. Such siNA formuations are generally referred to as “lipid nucleic acid particles” (LNP).

[0422] In one embodiment, a siNA molecule of the invention is complexed with membrane disruptive agents such as those described in U.S. Patent Application Publication No. 20010007666, incorporated by reference herein in its entirety including the drawings. In another embodiment, the membrane disruptive agent or agents and the siNA molecule are also complexed with a cationic lipid or helper lipid molecule, such as those lipids described in U.S. Pat. No. 6,235,310, incorporated by reference herein in its entirety including the drawings.

[0423] In one embodiment, a siNA molecule of the invention is complexed with delivery systems as described in U.S. Patent Application Publication No. 2003077829 and International PCT Publication Nos. WO 00/03683 and WO 02/087541, all incorporated by reference herein in their entirety including the drawings.

[0424] In one embodiment, the nucleic acid molecules of the invention are administered to skeletal tissues (e.g., bone, cartilage, tendon, ligament) or bone metastatic tumors via atelocollagen complexation or conjugation (see for example Takeshita et al., 2005, PNAS, 102, 12177-12182). Therefore, in one embodiment, the instant invention features one or more dsiNA molecules as a composition complexed with atelocollagen. In another embodiment, the instant invention features one or more siNA molecules conjugated to atelocollagen via a linker as described herein or otherwise known in the art.

[0425] In one embodiment, the nucleic acid molecules of the invention are administered via pulmonary delivery, such as by inhalation of an aerosol or spray dried formulation administered by an inhalation device or nebulizer, providing rapid local uptake of the nucleic acid molecules into relevant pulmonary tissues. Solid particulate compositions containing respirable dry particles of micronized nucleic acid compositions can be prepared by grinding dried or lyophilized nucleic acid compositions, and then passing the micronized composition through, for example, a 400 mesh screen to break up or separate out large agglomerates. A solid particulate composition comprising the nucleic acid compositions of the invention can optionally contain a dispersant which serves to facilitate the formation of an aerosol as well as other therapeutic compounds. A suitable dispersant is lactose, which can be blended with the nucleic acid compound in any suitable ratio, such as a 1 to 1 ratio by weight.

[0426] Aerosols of liquid particles comprising a nucleic acid composition of the invention can be produced by any suitable means, such as with a nebulizer (see for example U.S. Pat. No. 4,501,729). Nebulizers are commercially available devices which transform solutions or suspensions of an active ingredient into a therapeutic aerosol mist either by means of acceleration of a compressed gas, typically air or oxygen, through a narrow venturi orifice or by means of ultrasonic agitation. Suitable formulations for use in nebulizers comprise the active ingredient in a liquid carrier in an amount of up to 40% w/w preferably less than 20% w/w of the formulation. The carrier is typically water or a dilute aqueous alcoholic solution, preferably made isotonic with body fluids by the addition of, for example, sodium chloride or other suitable salts. Optional additives include preservatives if the formulation is not prepared sterile, for example, methyl hydroxybenzoate, anti-oxidants, flavorings, volatile oils, buffering agents and emulsifiers and other formulation surfactants. The aerosols of solid particles comprising the active composition and surfactant can likewise be produced with any solid particulate aerosol generator. Aerosol generators for administering solid particulate therapeutics to a subject produce particles which are respirable, as explained above, and generate a volume of aerosol containing a predetermined metered dose of a therapeutic composition at a rate suitable for human administration.

[0427] In one embodiment, a solid particulate aerosol generator of the invention is an insufflator. Suitable formulations for administration by insufflation include finely comminuted powders which can be delivered by means of an insufflator. In the insufflator, the powder, e.g., a metered dose thereof effective to carry out the treatments described herein, is contained in capsules or cartridges, typically made of gelatin or plastic, which are either pierced or opened in situ and the powder delivered by air drawn through the device upon inhalation or by means of a manually-operated pump. The powder employed in the insufflator consists either solely of the active ingredient or of a powder blend comprising the active ingredient, a suitable powder diluent, such as lactose, and an optional surfactant. The active ingredient typically comprises from 0.1 to 100 w/w of the formulation. A second type of illustrative aerosol generator comprises a metered dose inhaler. Metered dose inhalers are pressurized aerosol dispensers, typically containing a suspension or solution formulation of the active ingredient in a liquified propellant. During use these devices discharge the formulation through a valve adapted to deliver a metered volume to produce a fine particle spray containing the active ingredient. Suitable propellants include certain chlorofluorocarbon compounds, for example, dichlorodifluoromethane, trichlorofluoromethane, dichlorotetrafluoroethane and mixtures thereof. The formulation can additionally contain one or more co-solvents, for example, ethanol, emulsifiers and other formulation surfactants, such as oleic acid or sorbitan trioleate, anti-oxidants and suitable flavoring agents. Other methods for pulmonary delivery are described in, for example US Patent Application No. 20040037780, and U.S. Pat. Nos. 6,592,904; 6,582,728; 6,565,885, all incorporated by reference herein.

[0428] In one embodiment, the invention features the use of methods to deliver the nucleic acid molecules of the instant invention to the central nervous system and/or peripheral nervous system. Experiments have demonstrated the efficient in vivo uptake of nucleic acids by neurons. As an example of local administration of nucleic acids to nerve cells, Sommer et al., 1998, Antisense Nuc. Acid Drug Dev., 8, 75, describe a study in which a 15mer phosphorothioate antisense nucleic acid molecule to c-fos is administered to rats via microinjection into the brain. Antisense molecules labeled with tetramethylrhodamine-isothiocyanate (TRITC) or fluorescein isothiocyanate (FITC) were taken up by exclusively by neurons thirty minutes post-injection. A diffuse cytoplasmic staining and nuclear staining was observed in these cells. As an example of systemic administration of nucleic acid to nerve cells, Epa et al., 2000, Antisense Nuc. Acid Drug Dev., 10, 469, describe an in vivo mouse study in which beta-cyclodextrin-adamantane-oligonucleotide conjugates were used to target the p75 neurotrophin receptor in neuronally differentiated PC12 cells. Following a two week course of IP administration, pronounced uptake of p75 neurotrophin receptor antisense was observed in dorsal root ganglion (DRG) cells. In addition, a marked and consistent down-regulation of p75 was observed in DRG neurons. Additional approaches to the targeting of nucleic acid to neurons are described in Broaddus et al., 1998, J. Neurosurg., 88(4), 734; Karle et al., 1997, Eur. J. Pharmocol., 340(2/3), 153; Bannai et al., 1998, Brain Research, 784(1,2), 304; Rajakumar et al., 1997, Synapse, 26(3), 199; Wu-pong et al., 1999, BioPharm, 12(1), 32; Bannai et al., 1998, Brain Res. Protoc., 3(1), 83; Simantov et al., 1996, Neuroscience, 74(1), 39. Nucleic acid molecules of the invention are therefore amenable to delivery to and uptake by cells that express repeat expansion allelic variants for modulation of RE gene expression. The delivery of nucleic acid molecules of the invention, targeting RE is provided by a variety of different strategies. Traditional approaches to CNS delivery that can be used include, but are not limited to, intrathecal and intracerebroventricular administration, implantation of catheters and pumps, direct injection or perfusion at the site of injury or lesion, injection into the brain arterial system, or by chemical or osmotic opening of the blood-brain barrier. Other approaches can include the use of various transport and carrier systems, for example though the use of conjugates and biodegradable polymers. Furthermore, gene therapy approaches, for example as described in Kaplitt et al., U.S. Pat. No. 6,180,613 and Davidson, WO 04/013280, can be used to express nucleic acid molecules in the CNS.

[0429] The delivery of nucleic acid molecules of the invention to the CNS is provided by a variety of different strategies. Traditional approaches to CNS delivery that can be used include, but are not limited to, intrathecal and intracerebroventricular administration, implantation of catheters and pumps, direct injection or perfusion at the site of injury or lesion, injection into the brain arterial system, or by chemical or osmotic opening of the blood-brain barrier. Other approaches can include the use of various transport and carrier systems, for example though the use of conjugates and biodegradable polymers. Furthermore, gene therapy approaches, for example as described in Kaplitt et al., U.S. Pat. No. 6,180,613 and Davidson, WO 04/013280, can be used to express nucleic acid molecules in the CNS.

[0430] In one embodiment, a compound, molecule, or composition for the treatment of ocular conditions (e.g., macular degeneration, diabetic retinopathy etc.) is administered to a subject intraocularly or by intraocular means. In another embodiment, a compound, molecule, or composition for the treatment of ocular conditions (e.g., macular degeneration, diabetic retinopathy etc.) is administered to a subject periocularly or by periocular means (see for example Ahlheim et al., International PCT publication No. WO 03/24420). In one embodiment, a siNA molecule and/or formulation or composition thereof is administered to a subject intraocularly or by intraocular means. In another embodiment, a siNA molecule and/or formualtion or composition thereof is administered to a subject periocularly or by periocular means. Periocular administration generally provides a less invasive approach to administering siNA molecules and formualtion or composition thereof to a subject (see for example Ahlheim et al., International PCT publication No. WO 03/24420). The use of periocular administraction also minimizes the risk of retinal detachment, allows for more frequent dosing or administraction, provides a clinically relevant route of administraction for macular degeneration and other optic conditions, and also provides the possiblilty of using resevoirs (e.g., implants, pumps or other devices) for drug delivery. In one embodiment, siNA compounds and compositions of the invention are administered locally, e.g., via intraocular or periocular means, such as injection, iontophoresis (see, for example, WO 03/043689 and WO 03/030989), or implant, about every 1-50 weeks (e.g., about every 1, 2, 3, 4, 5, 6, 7, 8, 9, 10, 11, 12, 13, 14, 15, 16, 17, 18, 19, 20, 21, 22, 23, 24, 25, 26, 27, 28, 29, 30, 31, 32, 33, 34, 35, 36, 37, 38, 39, 40, 41, 42, 43, 44, 45, 46, 47, 48, 49, or 50 weeks), alone or in combination with other comounds and/or therapeis herein. In one embodiment, siNA compounds and compositions of the invention are administered systemically (e.g., via intravenous, subcutaneous, intramuscular, infusion, pump, implant etc.) about every 1-50 weeks (e.g., about every 1, 2, 3, 4, 5, 6, 7, 8, 9, 10, 11, 12, 13, 14, 15, 16, 17, 18, 19, 20, 21, 22, 23, 24, 25, 26, 27, 28, 29, 30, 31, 32, 33, 34, 35, 36, 37, 38, 39, 40, 41, 42, 43, 44, 45, 46, 47, 48, 49, or 50 weeks), alone or in combination with other comounds and/or therapies described herein and/or otherwise known in the art.

[0431] In one embodiment, a siNA molecule of the invention is administered iontophoretically, for example to a particular organ or compartment (e.g., the eye, back of the eye, heart, liver, kidney, bladder, prostate, tumor, CNS etc.). Non-limiting examples of iontophoretic delivery are described in, for example, WO 03/043689 and WO 03/030989, which are incorporated by reference in their entireties herein.

[0432] In one embodiment, the siNA molecules of the invention and formulations or compositions thereof are administered to the liver as is generally known in the art (see for example Wen et al., 2004, World J Gastroenterol., 10, 244-9; Murao et al., 2002, Pharm Res., 19, 1808-14; Liu et al., 2003, Gene Ther., 10, 180-7; Hong et al., 2003, J Pharm Pharmacol., 54, 51-8; Herrmann et al., 2004, Arch Virol., 149, 1611-7; and Matsuno et al., 2003, Gene Ther., 10, 1559-66).

[0433] In one embodiment, the invention features the use of methods to deliver the nucleic acid molecules of the instant invention to hematopoietic cells, including monocytes and lymphocytes. These methods are described in detail by Hartmann et al., 1998, J. Phamacol. Exp. Ther., 285(2), 920-928; Kronenwett et al., 1998, Blood, 91(3), 852-862; Filion and Phillips, 1997, Biochim. Biophys. Acta., 1329(2), 345-356; Ma and Wei, 1996, Leuk. Res., 20(11/12), 925-930; and Bongartz et al., 1994, Nucleic Acids Research, 22(22), 4681-8. Such methods, as described above, include the use of free oligonucleitide, cationic lipid formulations, liposome formulations including pH sensitive liposomes and immunoliposomes, and bioconjugates including oligonucleotides conjugated to fusogenic peptides, for the transfection of hematopoietic cells with oligonucleotides.

[0434] In one embodiment, the siNA molecules and compositions of the invention are administered to the inner ear by contacting the siNA with inner ear cells, tissues, or structures such as the cochlea, under conditions suitable for the administration. In one embodiment, the administration comprises methods and devices as described in U.S. Pat. Nos. 5,421,818, 5,476,446, 5,474,529, 6,045,528, 6,440,102, 6,685,697, 6,120,484; and 5,572,594; all incorporated by reference herein and the teachings of Silverstein, 1999, Ear Nose Throat J., 78, 595-8, 600; and Jackson and Silverstein, 2002, Otolaryngol Clin North Am., 35, 639-53, and adapted for use the siNA molecules of the invention.

[0435] In one embodiment, the siNA molecules of the invention and formulations or compositions thereof are administered directly or topically (e.g., locally) to the dermis or follicles as is generally known in the art (see for example Brand, 2001, Curr. Opin. Mol. Ther., 3, 244-8; Regnier et al., 1998, J. Drug Target, 5, 275-89; Kanikkannan, 2002, BioDrugs, 16, 339-47; Wraight et al., 2001, Pharmacol. Ther., 90, 89-104; and Preat and Dujardin, 2001, STP PharmaSciences, 11, 57-68). In one embodiment, the siNA molecules of the invention and formulations or compositions thereof are administered directly or topically using a hydroalcoholic gel formulation comprising an alcohol (e.g., ethanol or isopropanol), water, and optionally including additional agents such isopropyl myristate and carbomer 980.

[0436] In one embodiment, delivery systems of the invention include, for example, aqueous and nonaqueous gels, creams, multiple emulsions, microemulsions, liposomes, ointments, aqueous and nonaqueous solutions, lotions, aerosols, hydrocarbon bases and powders, and can contain excipients such as solubilizers, permeation enhancers (e.g., fatty acids, fatty acid esters, fatty alcohols and amino acids), and hydrophilic polymers (e.g., polycarbophil and polyvinylpyrolidone). In one embodiment, the pharmaceutically acceptable carrier is a liposome or a transdermal enhancer. Examples of liposomes which can be used in this invention include the following: (1) CellFectin, 1:1.5 (M/M) liposome formulation of the cationic lipid N,NI,NII,NIII-tetramethyl-N,NI,NII,NIII-tetrapalmit-y-spermine and dioleoyl phosphatidylethanolamine (DOPE) (GIBCO BRL); (2) Cytofectin GSV, 2:1 (M/M) liposome formulation of a cationic lipid and DOPE (Glen Research); (3) DOTAP (N-[1-(2,3-dioleoyloxy)-N,N,N-tri-methyl-ammoniummethylsulfate) (Boehringer Manheim); and (4) Lipofectamine, 3:1 (M/M) liposome formulation of the polycationic lipid DOSPA and the neutral lipid DOPE (GIBCO BRL).

[0437] In one embodiment, delivery systems of the invention include patches, tablets, suppositories, pessaries, gels and creams, and can contain excipients such as solubilizers and enhancers (e.g., propylene glycol, bile salts and amino acids), and other vehicles (e.g., polyethylene glycol, fatty acid esters and derivatives, and hydrophilic polymers such as hydroxypropylmethylcellulose and hyaluronic acid).

[0438] In one embodiment, a siNA molecule of the invention is administered iontophoretically, for example to the dermis or to other relevant tissues such as the inner ear/cochlea. Non-limiting examples of iontophoretic delivery are described in, for example, WO 03/043689 and WO 03/030989, which are incorporated by reference in their entireties herein.

[0439] In one embodiment, siNA molecules of the invention are formulated or complexed with polyethylenimine (e.g., linear or branched PEI) and/or polyethylenimine derivatives, including for example grafted PEIs such as galactose PEI, cholesterol PEI, antibody derivatized PEI, and polyethylene glycol PEI (PEG-PEI) derivatives thereof (see for example Ogris et al., 2001, AAPA PharmSci, 3, 1-11; Furgeson et al., 2003, Bioconjugate Chem., 14, 840-847; Kunath et al., 2002, Phramaceutical Research, 19, 810-817; Choi et al., 2001, Bull. Korean Chem. Soc., 22, 46-52; Bettinger et al., 1999, Bioconjugate Chem., 10, 558-561; Peterson et al., 2002, Bioconjugate Chem., 13, 845-854; Erbacher et al., 1999, Journal of Gene Medicine Preprint, 1, 1-18; Godbey et al., 1999., PNAS USA, 96, 5177-5181; Godbey et al., 1999, Journal of Controlled Release, 60, 149-160; Diebold et al., 1999, Journal of Biological Chemistry, 274, 19087-19094; Thomas and Klibanov, 2002, PNAS USA, 99, 14640-14645; and Sagara, U.S. Pat. No. 6,586,524, incorporated by reference herein.

[0440] In one embodiment, a siNA molecule of the invention comprises a bioconjugate, for example a nucleic acid conjugate as described in Vargeese et al., U.S. Ser. No. 10/427,160, filed Apr. 30, 2003; U.S. Pat. No. 6,528,631; U.S. Pat. No. 6,335,434; U.S. Pat. No. 6,235,886; U.S. Pat. No. 6,153,737; U.S. Pat. No. 5,214,136; U.S. Pat. No. 5,138,045, all incorporated by reference herein.

[0441] Thus, the invention features a pharmaceutical composition comprising one or more nucleic acid(s) of the invention in an acceptable carrier, such as a stabilizer, buffer, and the like. The polynucleotides of the invention can be administered (e.g., RNA, DNA or protein) and introduced to a subject by any standard means, with or without stabilizers, buffers, and the like, to form a pharmaceutical composition. When it is desired to use a liposome delivery mechanism, standard protocols for formation of liposomes can be followed. The compositions of the present invention can also be formulated and used as creams, gels, sprays, oils and other suitable compositions for topical, dermal, or transdermal administration as is known in the art.

[0442] The present invention also includes pharmaceutically acceptable formulations of the compounds described. These formulations include salts of the above compounds, e.g., acid addition salts, for example, salts of hydrochloric, hydrobromic, acetic acid, and benzene sulfonic acid.

[0443] A pharmacological composition or formulation refers to a composition or formulation in a form suitable for administration, e.g., systemic or local administration, into a cell or subject, including for example a human. Suitable forms, in part, depend upon the use or the route of entry, for example oral, transdermal, or by injection. Such forms should not prevent the composition or formulation from reaching a target cell (i.e., a cell to which the negatively charged nucleic acid is desirable for delivery). For example, pharmacological compositions injected into the blood stream should be soluble. Other factors are known in the art, and include considerations such as toxicity and forms that prevent the composition or formulation from exerting its effect.

[0444] In one embodiment, siNA molecules of the invention are administered to a subject by systemic administration in a pharmaceutically acceptable composition or formulation. By “systemic administration” is meant in vivo systemic absorption or accumulation of drugs in the blood stream followed by distribution throughout the entire body. Administration routes that lead to systemic absorption include, without limitation: intravenous, subcutaneous, portal vein, intraperitoneal, inhalation, oral, intrapulmonary and intramuscular. Each of these administration routes exposes the siNA molecules of the invention to an accessible diseased tissue. The rate of entry of a drug into the circulation has been shown to be a function of molecular weight or size. The use of a liposome or other drug carrier comprising the compounds of the instant invention can potentially localize the drug, for example, in certain tissue types, such as the tissues of the reticular endothelial system (RES). A liposome formulation that can facilitate the association of drug with the surface of cells, such as, lymphocytes and macrophages is also useful. This approach can provide enhanced delivery of the drug to target cells by taking advantage of the specificity of macrophage and lymphocyte immune recognition of abnormal cells.

[0445] By “pharmaceutically acceptable formulation” or “pharmaceutically acceptable composition” is meant, a composition or formulation that allows for the effective distribution of the nucleic acid molecules of the instant invention in the physical location most suitable for their desired activity. Non-limiting examples of agents suitable for formulation with the nucleic acid molecules of the instant invention include: P-glycoprotein inhibitors (such as Pluronic P85),; biodegradable polymers, such as poly (DL-lactide-coglycolide) microspheres for sustained release delivery (Emerich, D F et al, 1999, Cell Transplant, 8, 47-58); and loaded nanoparticles, such as those made of polybutylcyanoacrylate. Other non-limiting examples of delivery strategies for the nucleic acid molecules of the instant invention include material described in Boado et al., 1998, J. Pharm. Sci., 87, 1308-1315; Tyler et al., 1999, FEBS Lett., 421, 280-284; Pardridge et al., 1995, PNAS USA., 92, 5592-5596; Boado, 1995, Adv. Drug Delivery Rev., 15, 73-107; Aldrian-Herrada et al., 1998, Nucleic Acids Res., 26, 4910-4916; and Tyler et al., 1999, PNAS USA., 96, 7053-7058.

[0446] The invention also features the use of a composition comprising surface-modified liposomes containing poly (ethylene glycol) lipids (PEG-modified, or long-circulating liposomes or stealth liposomes) and nucleic acid molecules of the invention. These formulations offer a method for increasing the accumulation of drugs (e.g., siNA) in target tissues. This class of drug carriers resists opsonization and elimination by the mononuclear phagocytic system (MPS or RES), thereby enabling longer blood circulation times and enhanced tissue exposure for the encapsulated drug (Lasic et al. Chem. Rev. 1995, 95, 2601-2627; Ishiwata et al., Chem. Pharm. Bull. 1995, 43, 1005-1011). Such liposomes have been shown to accumulate selectively in tumors, presumably by extravasation and capture in the neovascularized target tissues (Lasic et al., Science 1995, 267, 1275-1276; Oku et al., 1995, Biochim. Biophys. Acta, 1238, 86-90). The long-circulating liposomes enhance the pharmacokinetics and pharmacodynamics of DNA and RNA, particularly compared to conventional cationic liposomes which are known to accumulate in tissues of the MPS (Liu et al., J. Biol. Chem. 1995, 42, 24864-24870; Choi et al., International PCT Publication No. WO 96/10391; Ansell et al., International PCT Publication No. WO 96/10390; Holland et al., International PCT Publication No. WO 96/10392). Long-circulating liposomes are also likely to protect drugs from nuclease degradation to a greater extent compared to cationic liposomes, based on their ability to avoid accumulation in metabolically aggressive MPS tissues such as the liver and spleen.

[0447] The present invention also includes compositions prepared for storage or administration that include a pharmaceutically effective amount of the desired compounds in a pharmaceutically acceptable carrier or diluent. Acceptable carriers or diluents for therapeutic use are well known in the pharmaceutical art, and are described, for example, in Remington's Pharmaceutical Sciences, Mack Publishing Co. (A. R. Gennaro edit. 1985), hereby incorporated by reference herein. For example, preservatives, stabilizers, dyes and flavoring agents can be provided. These include sodium benzoate, sorbic acid and esters of p-hydroxybenzoic acid. In addition, antioxidants and suspending agents can be used.

[0448] A pharmaceutically effective dose is that dose required to prevent, inhibit the occurrence, or treat (alleviate a symptom to some extent, preferably all of the symptoms) of a disease state. The pharmaceutically effective dose depends on the type of disease, the composition used, the route of administration, the type of mammal being treated, the physical characteristics of the specific mammal under consideration, concurrent medication, and other factors that those skilled in the medical arts will recognize. Generally, an amount between 0.1 mg/kg and 100 mg/kg body weight/day of active ingredients is administered dependent upon potency of the negatively charged polymer.

[0449] The nucleic acid molecules of the invention and formulations thereof can be administered orally, topically, parenterally, by inhalation or spray, or rectally in dosage unit formulations containing conventional non-toxic pharmaceutically acceptable carriers, adjuvants and/or vehicles. The term parenteral as used herein includes percutaneous, subcutaneous, intravascular (e.g., intravenous), intramuscular, or intrathecal injection or infusion techniques and the like. In addition, there is provided a pharmaceutical formulation comprising a nucleic acid molecule of the invention and a pharmaceutically acceptable carrier. One or more nucleic acid molecules of the invention can be present in association with one or more non-toxic pharmaceutically acceptable carriers and/or diluents and/or adjuvants, and if desired other active ingredients. The pharmaceutical compositions containing nucleic acid molecules of the invention can be in a form suitable for oral use, for example, as tablets, troches, lozenges, aqueous or oily suspensions, dispersible powders or granules, emulsion, hard or soft capsules, or syrups or elixirs.

[0450] Compositions intended for oral use can be prepared according to any method known to the art for the manufacture of pharmaceutical compositions and such compositions can contain one or more such sweetening agents, flavoring agents, coloring agents or preservative agents in order to provide pharmaceutically elegant and palatable preparations. Tablets contain the active ingredient in admixture with non-toxic pharmaceutically acceptable excipients that are suitable for the manufacture of tablets. These excipients can be, for example, inert diluents; such as calcium carbonate, sodium carbonate, lactose, calcium phosphate or sodium phosphate; granulating and disintegrating agents, for example, corn starch, or alginic acid; binding agents, for example starch, gelatin or acacia; and lubricating agents, for example magnesium stearate, stearic acid or talc. The tablets can be uncoated or they can be coated by known techniques. In some cases such coatings can be prepared by known techniques to delay disintegration and absorption in the gastrointestinal tract and thereby provide a sustained action over a longer period. For example, a time delay material such as glyceryl monosterate or glyceryl distearate can be employed.

[0451] Formulations for oral use can also be presented as hard gelatin capsules wherein the active ingredient is mixed with an inert solid diluent, for example, calcium carbonate, calcium phosphate or kaolin, or as soft gelatin capsules wherein the active ingredient is mixed with water or an oil medium, for example peanut oil, liquid paraffin or olive oil.

[0452] Aqueous suspensions contain the active materials in a mixture with excipients suitable for the manufacture of aqueous suspensions. Such excipients are suspending agents, for example sodium carboxymethylcellulose, methylcellulose, hydropropyl-methylcellulose, sodium alginate, polyvinylpyrrolidone, gum tragacanth and gum acacia; dispersing or wetting agents can be a naturally-occurring phosphatide, for example, lecithin, or condensation products of an alkylene oxide with fatty acids, for example polyoxyethylene stearate, or condensation products of ethylene oxide with long chain aliphatic alcohols, for example heptadecaethyleneoxycetanol, or condensation products of ethylene oxide with partial esters derived from fatty acids and a hexitol such as polyoxyethylene sorbitol monooleate, or condensation products of ethylene oxide with partial esters derived from fatty acids and hexitol anhydrides, for example polyethylene sorbitan monooleate. The aqueous suspensions can also contain one or more preservatives, for example ethyl, or n-propyl p-hydroxybenzoate, one or more coloring agents, one or more flavoring agents, and one or more sweetening agents, such as sucrose or saccharin.

[0453] Oily suspensions can be formulated by suspending the active ingredients in a vegetable oil, for example arachis oil, olive oil, sesame oil or coconut oil, or in a mineral oil such as liquid paraffin. The oily suspensions can contain a thickening agent, for example beeswax, hard paraffin or cetyl alcohol. Sweetening agents and flavoring agents can be added to provide palatable oral preparations. These compositions can be preserved by the addition of an anti-oxidant such as ascorbic acid

[0454] Dispersible powders and granules suitable for preparation of an aqueous suspension by the addition of water provide the active ingredient in admixture with a dispersing or wetting agent, suspending agent and one or more preservatives. Suitable dispersing or wetting agents or suspending agents are exemplified by those already mentioned above. Additional excipients, for example sweetening, flavoring and coloring agents, can also be present.

[0455] Pharmaceutical compositions of the invention can also be in the form of oil-in-water emulsions. The oily phase can be a vegetable oil or a mineral oil or mixtures of these. Suitable emulsifying agents can be naturally-occurring gums, for example gum acacia or gum tragacanth, naturally-occurring phosphatides, for example soy bean, lecithin, and esters or partial esters derived from fatty acids and hexitol, anhydrides, for example sorbitan monooleate, and condensation products of the said partial esters with ethylene oxide, for example polyoxyethylene sorbitan monooleate. The emulsions can also contain sweetening and flavoring agents.

[0456] Syrups and elixirs can be formulated with sweetening agents, for example glycerol, propylene glycol, sorbitol, glucose or sucrose. Such formulations can also contain a demulcent, a preservative and flavoring and coloring agents. The pharmaceutical compositions can be in the form of a sterile injectable aqueous or oleaginous suspension. This suspension can be formulated according to the known art using those suitable dispersing or wetting agents and suspending agents that have been mentioned above. The sterile injectable preparation can also be a sterile injectable solution or suspension in a non-toxic parentally acceptable diluent or solvent, for example as a solution in 1,3-butanediol. Among the acceptable vehicles and solvents that can be employed are water, Ringer's solution and isotonic sodium chloride solution. In addition, sterile, fixed oils are conventionally employed as a solvent or suspending medium. For this purpose, any bland fixed oil can be employed including synthetic mono- or diglycerides. In addition, fatty acids such as oleic acid find use in the preparation of injectables.

[0457] The nucleic acid molecules of the invention can also be administered in the form of suppositories, e.g., for rectal administration of the drug. These compositions can be prepared by mixing the drug with a suitable non-irritating excipient that is solid at ordinary temperatures but liquid at the rectal temperature and will therefore melt in the rectum to release the drug. Such materials include cocoa butter and polyethylene glycols.

[0458] Nucleic acid molecules of the invention can be administered parenterally in a sterile medium. The drug, depending on the vehicle and concentration used, can either be suspended or dissolved in the vehicle. Advantageously, adjuvants such as local anesthetics, preservatives and buffering agents can be dissolved in the vehicle.

[0459] Dosage levels of the order of from about 0.1 mg to about 140 mg per kilogram of body weight per day are useful in the treatment of the above-indicated conditions (about 0.5 mg to about 7 g per subject per day). The amount of active ingredient that can be combined with the carrier materials to produce a single dosage form varies depending upon the host treated and the particular mode of administration. Dosage unit forms generally contain between from about 1 mg to about 500 mg of an active ingredient.

[0460] It is understood that the specific dose level for any particular subject depends upon a variety of factors including the activity of the specific compound employed, the age, body weight, general health, sex, diet, time of administration, route of administration, and rate of excretion, drug combination and the severity of the particular disease undergoing therapy.

[0461] For administration to non-human animals, the composition can also be added to the animal feed or drinking water. It can be convenient to formulate the animal feed and drinking water compositions so that the animal takes in a therapeutically appropriate quantity of the composition along with its diet. It can also be convenient to present the composition as a premix for addition to the feed or drinking water.

[0462] The nucleic acid molecules of the present invention can also be administered to a subject in combination with other therapeutic compounds to increase the overall therapeutic effect. The use of multiple compounds to treat an indication can increase the beneficial effects while reducing the presence of side effects.

[0463] In one embodiment, the invention comprises compositions suitable for administering nucleic acid molecules of the invention to specific cell types. For example, the asialoglycoprotein receptor (ASGPr) (Wu and Wu, 1987, J. Biol. Chem. 262, 4429-4432) is unique to hepatocytes and binds branched galactose-terminal glycoproteins, such as asialoorosomucoid (ASOR). In another example, the folate receptor is overexpressed in many cancer cells. Binding of such glycoproteins, synthetic glycoconjugates, or folates to the receptor takes place with an affinity that strongly depends on the degree of branching of the oligosaccharide chain, for example, triatennary structures are bound with greater affinity than biatenarry or monoatennary chains (Baenziger and Fiete, 1980, Cell, 22, 611-620; Connolly et al., 1982, J. Biol. Chem., 257, 939-945). Lee and Lee, 1987, Glycoconjugate J., 4, 317-328, obtained this high specificity through the use of N-acetyl-D-galactosamine as the carbohydrate moiety, which has higher affinity for the receptor, compared to galactose. This “clustering effect” has also been described for the binding and uptake of mannosyl-terminating glycoproteins or glycoconjugates (Ponpipom et al., 1981, J. Med. Chem., 24, 1388-1395). The use of galactose, galactosamine, or folate based conjugates to transport exogenous compounds across cell membranes can provide a targeted delivery approach to, for example, the treatment of liver disease, cancers of the liver, or other cancers. The use of bioconjugates can also provide a reduction in the required dose of therapeutic compounds required for treatment. Furthermore, therapeutic bioavailability, pharmacodynamics, and pharmacokinetic parameters can be modulated through the use of nucleic acid bioconjugates of the invention. Non-limiting examples of such bioconjugates are described in Vargeese et al., U.S. Ser. No. 10/201,394, filed Aug. 13, 2001; and Matulic-Adamic et al., U.S. Ser. No. 60/362,016, filed Mar. 6, 2002.

[0464] Alternatively, certain siNA molecules of the instant invention can be expressed within cells from eukaryotic promoters (e.g., Izant and Weintraub, 1985, Science, 229, 345; McGarry and Lindquist, 1986, Proc. Natl. Acad. Sci., USA 83, 399; Scanlon et al., 1991, Proc. Natl. Acad. Sci. USA, 88, 10591-5; Kashani-Sabet et al., 1992, Antisense Res. Dev., 2, 3-15; Dropulic et al., 1992, J. Virol., 66, 1432-41; Weerasinghe et al., 1991, J. Virol., 65, 5531-4; Ojwang et al., 1992, Proc. Natl. Acad. Sci. USA, 89, 10802-6; Chen et al., 1992, Nucleic Acids Res., 20, 4581-9; Sarver et al., 1990 Science, 247, 1222-1225; Thompson et al., 1995, Nucleic Acids Res., 23, 2259; Good et al., 1997, Gene Therapy, 4, 45. Those skilled in the art realize that any nucleic acid can be expressed in eukaryotic cells from the appropriate DNA/RNA vector. The activity of such nucleic acids can be augmented by their release from the primary transcript by a enzymatic nucleic acid (Draper et al., PCT WO 93/23569, and Sullivan et al., PCT WO 94/02595; Ohkawa et al., 1992, Nucleic Acids Symp. Ser., 27, 15-6; Taira et al., 1991, Nucleic Acids Res., 19, 5125-30; Ventura et al., 1993, Nucleic Acids Res., 21, 3249-55; Chowrira et al., 1994, J. Biol. Chem., 269, 25856.

[0465] In another aspect of the invention, RNA molecules of the present invention can be expressed from transcription units (see for example Couture et al., 1996, TIG., 12, 510) inserted into DNA or RNA vectors. The recombinant vectors can be DNA plasmids or viral vectors. siNA expressing viral vectors can be constructed based on, but not limited to, adeno-associated virus, retrovirus, adenovirus, or alphavirus. In another embodiment, pol III based constructs are used to express nucleic acid molecules of the invention (see for example Thompson, U.S. Pats. Nos. 5,902,880 and 6,146,886). The recombinant vectors capable of expressing the siNA molecules can be delivered as described above, and persist in target cells. Alternatively, viral vectors can be used that provide for transient expression of nucleic acid molecules. Such vectors can be repeatedly administered as necessary. Once expressed, the siNA molecule interacts with the target mRNA and generates an RNAi response. Delivery of siNA molecule expressing vectors can be systemic, such as by intravenous or intra-muscular administration, by administration to target cells ex-planted from a subject followed by reintroduction into the subject, or by any other means that would allow for introduction into the desired target cell (for a review see Couture et al., 1996, TIG., 12, 510).

[0466] In one aspect the invention features an expression vector comprising a nucleic acid sequence encoding at least one siNA molecule of the instant invention. The expression vector can encode one or both strands of a siNA duplex, or a single self-complementary strand that self hybridizes into a siNA duplex. The nucleic acid sequences encoding the siNA molecules of the instant invention can be operably linked in a manner that allows expression of the siNA molecule (see for example Paul et al., 2002, Nature Biotechnology, 19, 505; Miyagishi and Taira, 2002, Nature Biotechnology, 19, 497; Lee et al., 2002, Nature Biotechnology, 19, 500; and Novina et al., 2002, Nature Medicine, advance online publication doi: 10.1038/nm725).

[0467] In another aspect, the invention features an expression vector comprising: a) a transcription initiation region (e.g., eukaryotic pol I, II or III initiation region); b) a transcription termination region (e.g., eukaryotic pol I, II or III termination region); and c) a nucleic acid sequence encoding at least one of the siNA molecules of the instant invention, wherein said sequence is operably linked to said initiation region and said termination region in a manner that allows expression and/or delivery of the siNA molecule. The vector can optionally include an open reading frame (ORF) for a protein operably linked on the 5′ side or the 3′-side of the sequence encoding the siNA of the invention; and/or an intron (intervening sequences).

[0468] Transcription of the siNA molecule sequences can be driven from a promoter for eukaryotic RNA polymerase I (pol I), RNA polymerase II (pol II), or RNA polymerase III (pol III). Transcripts from pol II or pol III promoters are expressed at high levels in all cells; the levels of a given pol II promoter in a given cell type depends on the nature of the gene regulatory sequences (enhancers, silencers, etc.) present nearby. Prokaryotic RNA polymerase promoters are also used, providing that the prokaryotic RNA polymerase enzyme is expressed in the appropriate cells (Elroy-Stein and Moss, 1990, Proc. Natl. Acad. Sci. USA, 87, 6743-7; Gao and Huang 1993, Nucleic Acids Res., 21, 2867-72; Lieber et al., 1993, Methods Enzymol., 217, 47-66; Zhou et al., 1990, Mol. Cell. Biol., 10, 4529-37). Several investigators have demonstrated that nucleic acid molecules expressed from such promoters can function in mammalian cells (e.g. Kashani-Sabet et al., 1992, Antisense Res. Dev., 2, 3-15; Ojwang et al., 1992, Proc. Natl. Acad. Sci. USA, 89, 10802-6; Chen et al., 1992, Nucleic Acids Res., 20, 4581-9; Yu et al., 1993, Proc. Natl. Acad. Sci. USA, 90, 6340-4; L'Huillier et al., 1992, EMBO J., 11, 4411-8; Lisziewicz et al., 1993, Proc. Natl. Acad. Sci. U.S.A., 90, 8000-4; Thompson et al., 1995, Nucleic Acids Res., 23, 2259; Sullenger & Cech, 1993, Science, 262, 1566). More specifically, transcription units such as the ones derived from genes encoding U6 small nuclear (snRNA), transfer RNA (tRNA) and adenovirus VA RNA are useful in generating high concentrations of desired RNA molecules such as siNA in cells (Thompson et al., supra; Couture and Stinchcomb, 1996, supra; Noonberg et al., 1994, Nucleic Acid Res., 22, 2830; Noonberg et al., U.S. Pat. No. 5,624,803; Good et al., 1997, Gene Ther., 4, 45; Beigelman et al., International PCT Publication No. WO 96/18736. The above siNA transcription units can be incorporated into a variety of vectors for introduction into mammalian cells, including but not restricted to, plasmid DNA vectors, viral DNA vectors (such as adenovirus or adeno-associated virus vectors), or viral RNA vectors (such as retroviral or alphavirus vectors) (for a review see Couture and Stinchcomb, 1996, supra).

[0469] In another aspect the invention features an expression vector comprising a nucleic acid sequence encoding at least one of the siNA molecules of the invention in a manner that allows expression of that siNA molecule. The expression vector comprises in one embodiment; a) a transcription initiation region; b) a transcription termination region; and c) a nucleic acid sequence encoding at least one strand of the siNA molecule, wherein the sequence is operably linked to the initiation region and the termination region in a manner that allows expression and/or delivery of the siNA molecule.

[0470] In another embodiment the expression vector comprises: a) a transcription initiation region; b) a transcription termination region; c) an open reading frame; and d) a nucleic acid sequence encoding at least one strand of a siNA molecule, wherein the sequence is operably linked to the 3′-end of the open reading frame and wherein the sequence is operably linked to the initiation region, the open reading frame and the termination region in a manner that allows expression and/or delivery of the siNA molecule. In yet another embodiment, the expression vector comprises: a) a transcription initiation region; b) a transcription termination region; c) an intron; and d) a nucleic acid sequence encoding at least one siNA molecule, wherein the sequence is operably linked to the initiation region, the intron and the termination region in a manner which allows expression and/or delivery of the nucleic acid molecule.

[0471] In another embodiment, the expression vector comprises: a) a transcription initiation region; b) a transcription termination region; c) an intron; d) an open reading frame; and e) a nucleic acid sequence encoding at least one strand of a siNA molecule, wherein the sequence is operably linked to the 3′-end of the open reading frame and wherein the sequence is operably linked to the initiation region, the intron, the open reading frame and the termination region in a manner which allows expression and/or delivery of the siNA molecule.

Histone Deacetylase (HDAC) Biology and Biochemistry

[0472] The following discussion is adapted from Acharya et al., 2005, Molecular Pharmacology Fast Forward, June 14, 1-49. The epigenome is defined by DNA methylation patterns and the associated post-translational modifications of histones, which are integral in gene expression. For example, this histone code determines the expression status of individual genes dependent upon their localization on the chromatin. The histone deacetylases (HDACs) play a major role in keeping the balance between the acetylated and deacetylated states of chromatin and eventually regulate gene expression by altering the dynamic balance between heterochromatin and euchromatin. Recent developments in understanding the cancer cell cycle, specifically the interplay with chromatin control and regulation, are providing opportunities for developing mechanism-based therapeutic drugs. Inhibitors of HDACs are under considerable exploration both non-clinically and in the clinic, in part due to their potential roles in reversing the silenced genes in transformed tumor cells by modulating transcriptional processes.

[0473] In eukaryotic cells, DNA has been conserved over evolution in a condensed and densely packed higher order structure generally called chromatin. Chromatin, which is present in the interphase nucleus, comprises regular repeating units of nucleosomes, which represent the principal protein-nucleic acid interface. The major components of chromatin include nucleic acids (DNA and RNA), which are negatively charged, associated proteins, including histones, that are positively charged at neutral pH, and non-histone chromosomal proteins which are acidic at neutral pH. Within the nucleus, chromatin can exist in two different forms; heterochromatin, which is highly compact and transcriptionally inactive form, or euchromatin, which is loosely packed and is accessible to RNA polymerases for involvement in transcriptional processes and resulting gene expression. A nucleosome is a complex of about 146 nucleotide base pairs of DNA wrapped around the core histone octamer that helps organize chromatin structure. The histone octamer is composed of two copies of each of H2A, H2B, H3 and H4 proteins that are very basic mainly due to positively charged amino-terminal side chains rich in the amino acid lysine. Post-translational and other changes in chromatin, such as acetylation/deacetylation at lysine residues, methylation at lysine or arginine residues, phosphorylation at serine resides, ubiquitylation at lysines, and/or ADP ribosylation, are mediated by chemical modification of various sites on the N-terminal tail. The structural modification of histones is regulated mainly by acetylation and deacetylation of the N-terminal tail and is crucial in modulating gene expression, as it affects the interaction of DNA with transcription-regulatory non-nucleosomal protein complexes.

[0474] The balance between the acetylated and deacetylated states of histones is mediated by two different sets of enzymes called histone acetyltransferases (HATs) and histone deacetylases (HDACs). HATs preferentially acetylate specific lysine substrates among other non-histone protein substrates and transcription factors, impacting DNA-binding properties and in turn, altering levels of gene transcription and ultimate gene expression. HDACs restore the positive charge on lysine residues by removing acetyl groups and are therefore involved primarily in the repression of gene transcription by condensing chromatin structure. As such, open lysine residues can attach firmly to the phosphate backbone of DNA, preventing transcription. In this tight conformation, transcription factors, regulatory complexes, and RNA polymerases cannot bind to the DNA and gene expression is effectively silenced. Acetylation relaxes the DNA conformation, making it accessible to the transcription machinery. High levels of acetylation of core histones are seen in chromatin-containing genes, which are highly transcribed genes, whereas those genes that are silent are associated with low levels of acetylation.

[0475] Because inappropriate silencing of critical genes can result in one or both hits of tumor suppressor gene (TSG) inactivation in cancer, theoretically, the reactivation of affected TSGs could have an enormous therapeutic value in preventing and treating cancer and other proliferative diseases and conditions.

[0476] The equilibrium of steady state acetylation and deacetylation is tightly controlled by the antagonistic effect of both HATs and HDACs, which in turn regulates transcription status of not just histones, but also of other substrates such as p53. Several groups of proteins with HAT activity have been identified to date, including GNAT (Gcn5-related N-acetyl transferase) family, MYST (monocytic leukemia zinc finger protein) group, TIP60 (TAT-interactive protein) and the p300/CBP (CREB-binding protein) family. HATs act as large multiprotein complexes containing other HATs, coactivators for transcription factors, and certain co-repressors. HATs, which bind non-histone protein substrates and transcription factors, have also been called factor acetyltransferases. Acetylation of these transcription factors can also affect their DNA binding properties and resulting gene transcription. HAT genes are associated with some cancers, for example, HAT genes can be overexpressed, translocated, or mutated in both hematological and epithelial cancers. The translocation of HATs, CREB-binding protein (CBP), and p300 acetyltransferases into certain genes have given rise to various hematological malignancies.

[0477] There are three major groups or classes of mammalian histone deacetylases (HDACs) based on their structural homologies to the three distinct yeast HDACs: Rpd3 (class I), Hda1 (class II), and Sir2/Hst (class III). Class III HDACs consist of the large family of sirtuins (silent information regulators or SIRs) that are evolutionarily distinct, with a unique enzymatic mechanism dependent on the cofactor NAD+, and which are all virtually unaffected by all HDAC inhibitors in current development. Both class I and class II HDACs contain an active site zinc as a critical component of their enzymatic pocket, have been extensively described to have an association with cancers, and are thought to be comparably inhibited by all HDAC inhibitors in development thus far. The Rpd3 homologous class I include HDACs 1, 2, 3 and 8, are widely expressed in various tissues and are primarily localized in the nucleus. Hda1 homologous class II HDACs 4, 5, 6, 7, 9a, 9b and 10, are much larger in size, display limited tissue distribution and can shuttle between the nucleus and cytoplasm, which suggests different functions and cellular substrates from Class I HDACs. HDACs 6 and 10 are unique as they have two catalytic domains, while HDACs 4, 8 and 9 are expressed to greater extent in tumor tissues and have been shown to be specifically involved in differentiation processes.

[0478] HDACs usually interact as constituents of large protein complexes that down-regulate genes through association with co-repressors, such as nuclear receptor corepressor (NcoR), silencing mediator for retinoid and thyroid hormone receptor (SMRT), transcription factors, estrogen receptors (ER), p53, cell-cycle specific regulators like retinoblastoma (Rb), E2F and other HDACs, as well as histones, but they can also bind to their corresponding receptor directly. Class III HDACs (sirtuins, SIR T1, 2, 3, 4, 5, 6 and 7) are generally not inhibited by class I and II HDAC inhibitors, but instead are inhibited by nicotinamide (Vitamin B3). Nicotinamide inhibits an NAD-dependent p53 deacetylation process which is induced by SIR2alpha, and also enhances p53 acetylation levels in vivo. It has been shown that by restraining mammalian forkhead proteins, specifically foxo3a, SIRT1 can also reduce apoptosis. The inhibition of forkhead activity by SIRT1 parallels the effect of this particular deacetylase on the tumor suppressor p53. These findings have significant implications regarding an important role for Sirtuins in modulating the sensitivity of cells in p53-dependent apoptotic response and the possible effect in areas ranging from cancer therapy to lifespan extension.

[0479] Chromatin modification and cancer related DNA gene expression is controlled by an assembly of nucleoproteins that includes histones and other architectural components of chromatin, non-histone DNA-bound regulators, and additional chromatin-bound polypeptides. Changes in growth and differentiation leading to transformation and malignancy appear to occur by alterations in transcriptional control and gene silencing. It has become increasingly apparent that imbalances of both DNA methylation and histone acetylation play an important role in cancer development and progression. Unlike normal cells, in cancerous cells, changes in genome expression are associated with the remodeling of long regions of regulatory DNA sequences, including promoters, enhancers, locus control regions, and insulators, into specific chromatin architecture. These specific changes in DNA architecture result in a general molecular signature for a specific type of cancer and complement its DNA methylation based component.

[0480] The changes in the infrastructure of chromatin organization over a target promoter are more profound than those observed by these enzymes acting independently. In addition to acetylation, histone tails undergo other modifications including methylation, phosphorylation, ubiquitylation and adenosine diphosphate ribosylation. Disruption of HAT and HDAC function is associated with the development of cancer and malignant cells target chromatin-remodeling pathways as a means of disrupting transcriptional regulation and control. Of the various hypotheses describing deregulation mechanisms, the following three have been put forth frequently: i) disordered hyperacetylation could activate promoters that are normally repressed leading to inappropriate expression of proteins, ii) abnormally decreased acetylation levels of promoter regions could repress the expression of genes necessary for a certain phenotype and iii) mistargeted or aberrant recruitment of HAT/HDAC activity could act as a pathological trigger for oncogenesis.

[0481] Based upon the current understanding of HAT and HDAC function, the modulation of HAT and HDAC and other related genes is instrumental in the development of new therapeutics for cancer and proliferative diseases and conditions. As such, modulation of HDACs using small interfering nucleic acid (siNA) mediated RNAi represents a novel approach to the treatment and study of diseases and conditions related to HDAC activity and/or gene expression.

### EXAMPLES

[0482] The following are non-limiting examples showing the selection, isolation, synthesis and activity of nucleic acids of the instant invention.

### Example 1

### Tandem Synthesis of siNA Constructs

[0483] Exemplary siNA molecules of the invention are synthesized in tandem using a cleavable linker, for example, a succinyl-based linker. Tandem synthesis as described herein is followed by a one-step purification process that provides RNAi molecules in high yield. This approach is highly amenable to siNA synthesis in support of high throughput RNAi screening, and can be readily adapted to multi-column or multi-well synthesis platforms.

[0484] After completing a tandem synthesis of a siNA oligo and its complement in which the 5′-terminal dimethoxytrityl (5′-O-DMT) group remains intact (trityl on synthesis), the oligonucleotides are deprotected as described above. Following deprotection, the siNA sequence strands are allowed to spontaneously hybridize. This hybridization yields a duplex in which one strand has retained the 5′-O-DMT group while the complementary strand comprises a terminal 5′-hydroxyl. The newly formed duplex behaves as a single molecule during routine solid-phase extraction purification (Trityl-On purification) even though only one molecule has a dimethoxytrityl group. Because the strands form a stable duplex, this dimethoxytrityl group (or an equivalent group, such as other trityl groups or other hydrophobic moieties) is all that is required to purify the pair of oligos, for example, by using a C18 cartridge.

[0485] Standard phosphoramidite synthesis chemistry is used up to the point of introducing a tandem linker, such as an inverted deoxy abasic succinate or glyceryl succinate linker (see FIG. 1) or an equivalent cleavable linker. A non-limiting example of linker coupling conditions that can be used includes a hindered base such as diisopropylethylamine (DIPA) and/or DMAP in the presence of an activator reagent such as Bromotripyrrolidinophosphoniumhexaflurorophosphate (PyBrOP). After the linker is coupled, standard synthesis chemistry is utilized to complete synthesis of the second sequence leaving the terminal the 5′-O-DMT intact. Following synthesis, the resulting oligonucleotide is deprotected according to the procedures described herein and quenched with a suitable buffer, for example with 50 mM NaOAc or 1.5M NH₄H₂CO₃.

[0486] Purification of the siNA duplex can be readily accomplished using solid phase extraction, for example, using a Waters C18 SepPak 1 g cartridge conditioned with 1 column volume (CV) of acetonitrile, 2 CV H2O, and 2 CV 50 mM NaOAc. The sample is loaded and then washed with 1 CV H2O or 50 mM NaOAc. Failure sequences are eluted with 1 CV 14% ACN (Aqueous with 50 mM NaOAc and 50 mM NaCl). The column is then washed, for example with 1 CV H2O followed by on-column detritylation, for example by passing 1 CV of 1% aqueous trifluoroacetic acid (TFA) over the column, then adding a second CV of 1% aqueous TFA to the column and allowing to stand for approximately 10 minutes. The remaining TFA solution is removed and the column washed with H20 followed by 1 CV 1M NaCl and additional H2O. The siNA duplex product is then eluted, for example, using 1 CV 20% aqueous CAN.

[0487] FIG. 2 provides an example of MALDI-TOF mass spectrometry analysis of a purified siNA construct in which each peak corresponds to the calculated mass of an individual siNA strand of the siNA duplex. The same purified siNA provides three peaks when analyzed by capillary gel electrophoresis (CGE), one peak presumably corresponding to the duplex siNA, and two peaks presumably corresponding to the separate siNA sequence strands. Ion exchange HPLC analysis of the same siNA contract only shows a single peak. Testing of the purified siNA construct using a luciferase reporter assay described below demonstrated the same RNAi activity compared to siNA constructs generated from separately synthesized oligonucleotide sequence strands.

### Example 2

### Identification of Potential siNA Target Sites in any RNA Sequence

[0488] The sequence of an RNA target of interest, such as a HDAC mRNA transcript, is screened for target sites, for example by using a computer folding algorithm. In a non-limiting example, the sequence of a HDAC gene or HDAC RNA gene transcript derived from a database, such as Genbank, is used to generate siNA targets having complementarity to the target. Such sequences can be obtained from a database, or can be determined experimentally as known in the art. Target sites that are known, for example, those target sites determined to be effective target sites based on studies with other nucleic acid molecules, for example ribozymes or antisense, or those targets known to be associated with a disease, trait, or condition such as those sites containing mutations or deletions, can be used to design siNA molecules targeting those sites. Various parameters can be used to determine which sites are the most suitable target sites within the target RNA sequence. These parameters include but are not limited to secondary or tertiary RNA structure, the nucleotide base composition of the target sequence, the degree of homology between various regions of the target sequence, or the relative position of the target sequence within the RNA transcript. Based on these determinations, any number of target sites within the RNA transcript can be chosen to screen siNA molecules for efficacy, for example by using in vitro RNA cleavage assays, cell culture, or animal models. In a non-limiting example, anywhere from 1 to 1000 target sites are chosen within the transcript based on the size of the siNA construct to be used. High throughput screening assays can be developed for screening siNA molecules using methods known in the art, such as with multi-well or multi-plate assays to determine efficient reduction in target gene expression.

### Example 3

### Selection of siNA Molecule Target Sites in a RNA

[0489] The following non-limiting steps can be used to carry out the selection of siNAs targeting a given gene sequence or transcript.

[0490] 1. The target sequence is parsed in silico into a list of all fragments or subsequences of a particular length, for example 23 nucleotide fragments, contained within the target sequence. This step is typically carried out using a custom Perl script, but commercial sequence analysis programs such as Oligo, MacVector, or the GCG Wisconsin Package can be employed as well.

[0491] 2. In some instances the siNAs correspond to more than one target sequence; such would be the case for example in targeting different transcripts of the same gene, targeting different transcripts of more than one gene, or for targeting both the human gene and an animal homolog. In this case, a subsequence list of a particular length is generated for each of the targets, and then the lists are compared to find matching sequences in each list. The subsequences are then ranked according to the number of target sequences that contain the given subsequence; the goal is to find subsequences that are present in most or all of the target sequences. Alternately, the ranking can identify subsequences that are unique to a target sequence, such as a mutant target sequence. Such an approach would enable the use of siNA to target specifically the mutant sequence and not effect the expression of the normal sequence.

[0492] 3. In some instances the siNA subsequences are absent in one or more sequences while present in the desired target sequence; such would be the case if the siNA targets a gene with a paralogous family member that is to remain untargeted. As in case 2 above, a subsequence list of a particular length is generated for each of the targets, and then the lists are compared to find sequences that are present in the target gene but are absent in the untargeted paralog.

[0493] 4. The ranked siNA subsequences can be further analyzed and ranked according to GC content. A preference can be given to sites containing 30-70% GC, with a further preference to sites containing 40-60% GC.

[0494] 5. The ranked siNA subsequences can be further analyzed and ranked according to self-folding and internal hairpins. Weaker internal folds are preferred; strong hairpin structures are to be avoided.

[0495] 6. The ranked siNA subsequences can be further analyzed and ranked according to whether they have runs of GGG or CCC in the sequence. GGG (or even more Gs) in either strand can make oligonucleotide synthesis problematic and can potentially interfere with RNAi activity, so it is avoided whenever better sequences are available. CCC is searched in the target strand because that will place GGG in the antisense strand.

[0496] 7. The ranked siNA subsequences can be further analyzed and ranked according to whether they have the dinucleotide UU (uridine dinucleotide) on the 3′-end of the sequence, and/or AA on the 5′-end of the sequence (to yield 3′ UU on the antisense sequence). These sequences allow one to design siNA molecules with terminal TT thymidine dinucleotides.

[0497] 8. Four or five target sites are chosen from the ranked list of subsequences as described above. For example, in subsequences having 23 nucleotides, the right 21 nucleotides of each chosen 23-mer subsequence are then designed and synthesized for the upper (sense) strand of the siNA duplex, while the reverse complement of the left 21 nucleotides of each chosen 23-mer subsequence are then designed and synthesized for the lower (antisense) strand of the siNA duplex (see Table II). If terminal TT residues are desired for the sequence (as described in paragraph 7), then the two 3′ terminal nucleotides of both the sense and antisense strands are replaced by TT prior to synthesizing the oligos.

[0498] 9. The siNA molecules are screened in an in vitro, cell culture or animal model system to identify the most active siNA molecule or the most preferred target site within the target RNA sequence.

[0499] 10. Other design considerations can be used when selecting target nucleic acid sequences, see, for example, Reynolds et al., 2004, Nature Biotechnology, 22, 326-330 and Ui-Tei et al., 2004, Nucleic Acids Research, 32, 936-948.

[0500] In an alternate approach, a pool of siNA constructs specific to a target sequence is used to screen for target sites in cells expressing target RNA, such as cultured Jurkat, HeLa, A549 or 293T cells. The general strategy used in this approach is shown in FIG. 9. Cells expressing the target RNA are transfected with the pool of siNA constructs and cells that demonstrate a phenotype associated with target inhibition are sorted. The pool of siNA constructs can be expressed from transcription cassettes inserted into appropriate vectors (see for example FIG. 7 and FIG. 8). The siNA from cells demonstrating a positive phenotypic change (e.g., decreased proliferation, decreased target mRNA levels or decreased target protein expression), are sequenced to determine the most suitable target site(s) within the target target RNA sequence.

### Example 4

### siNA Design

[0501] siNA target sites were chosen by analyzing sequences of HDAC target RNA sequences using the parameters described in Example 3 above and optionally prioritizing the target sites on the basis of folding (structure of any given sequence analyzed to determine siNA accessibility to the target). Such sites can also be chosen by using a library of siNA molecules as described in Example 3, or alternately by using an in vitro siNA system as described in Example 6 herein. siNA molecules were designed that could bind each target and are optionally individually analyzed by computer folding to assess whether the siNA molecule can interact with the target sequence. Chemical modification criteria were applied in designing chemically modified siNA molecules (see for example Table III) based on stabilization chemistry motifs described herein (see for example Table IV). Varying the length of the siNA molecules can be chosen to optimize activity. Generally, a sufficient number of complementary nucleotide bases are chosen to bind to, or otherwise interact with, the target RNA, but the degree of complementarity can be modulated to accommodate siNA duplexes or varying length or base composition. By using such methodologies, siNA molecules can be designed to target sites within any known RNA sequence, for example those RNA sequences corresponding to the any gene transcript.

[0502] Chemically modified siNA constructs are designed to provide nuclease stability for systemic administration in vivo and/or improved pharmacokinetic, localization, and delivery properties while preserving the ability to mediate RNAi activity. Chemical modifications as described herein are introduced synthetically using synthetic methods described herein and those generally known in the art. The synthetic siNA constructs are then assayed for nuclease stability in serum and/or cellular/tissue extracts (e.g. liver extracts). The synthetic siNA constructs are also tested in parallel for RNAi activity using an appropriate assay, such as a luciferase reporter assay as described herein or another suitable assay that can quantity RNAi activity. Synthetic siNA constructs that possess both nuclease stability and RNAi activity can be further modified and re-evaluated in stability and activity assays. The chemical modifications of the stabilized active siNA constructs can then be applied to any siNA sequence targeting any chosen RNA and used, for example, in target screening assays to pick lead siNA compounds for therapeutic development (see for example FIG. 11).

### Example 5

### Chemical Synthesis and Purification of siNA

[0503] siNA molecules can be designed to interact with various sites in the RNA message, for example, target sequences within the RNA sequences described herein. The sequence of one strand of the siNA molecule(s) is complementary to the target site sequences described above. The siNA molecules can be chemically synthesized using methods described herein. Inactive siNA molecules that are used as control sequences can be synthesized by scrambling the sequence of the siNA molecules such that it is not complementary to the target sequence. Generally, siNA constructs can by synthesized using solid phase oligonucleotide synthesis methods as described herein (see for example Usman et al., U.S. Pat. Nos. 5,804,683; 5,831,071; 5,998,203; 6,117,657; 6,353,098; 6,362,323; 6,437,117; 6,469,158; Scaringe et al., U.S. Pat. Nos. 6,111,086; 6,008,400; 6,111,086 all incorporated by reference herein in their entirety).

[0504] In a non-limiting example, RNA oligonucleotides are synthesized in a stepwise fashion using the phosphoramidite chemistry as is known in the art. Standard phosphoramidite chemistry involves the use of nucleosides comprising any of 5′-O-dimethoxytrityl, 2′-O-tert-butyldimethylsilyl, 3′-O-2-Cyanoethyl N,N-diisopropylphosphoroamidite groups, and exocyclic amine protecting groups (e.g. N6-benzoyl adenosine, N4 acetyl cytidine, and N2-isobutyryl guanosine). Alternately, 2′-O-Silyl Ethers can be used in conjunction with acid-labile 2′-O-orthoester protecting groups in the synthesis of RNA as described by Scaringe supra. Differing 2′ chemistries can require different protecting groups, for example 2′-deoxy-2′-amino nucleosides can utilize N-phthaloyl protection as described by Usman et al., U.S. Pat. No. 5,631,360, incorporated by reference herein in its entirety).

[0505] During solid phase synthesis, each nucleotide is added sequentially (3′- to 5′-direction) to the solid support-bound oligonucleotide. The first nucleoside at the 3′-end of the chain is covalently attached to a solid support (e.g., controlled pore glass or polystyrene) using various linkers. The nucleotide precursor, a ribonucleoside phosphoramidite, and activator are combined resulting in the coupling of the second nucleoside phosphoramidite onto the 5′-end of the first nucleoside. The support is then washed and any unreacted 5′-hydroxyl groups are capped with a capping reagent such as acetic anhydride to yield inactive 5′-acetyl moieties. The trivalent phosphorus linkage is then oxidized to a more stable phosphate linkage. At the end of the nucleotide addition cycle, the 5′-O-protecting group is cleaved under suitable conditions (e.g., acidic conditions for trityl-based groups and Fluoride for silyl-based groups). The cycle is repeated for each subsequent nucleotide.

[0506] Modification of synthesis conditions can be used to optimize coupling efficiency, for example by using differing coupling times, differing reagent/phosphoramidite concentrations, differing contact times, differing solid supports and solid support linker chemistries depending on the particular chemical composition of the siNA to be synthesized. Deprotection and purification of the siNA can be performed as is generally described in Usman et al., U.S. Pat. No. 5,831,071, U.S. Pat. No. 6,353,098, U.S. Pat. No. 6,437,117, and Bellon et al., U.S. Pat. No. 6,054,576, U.S. Pat. No. 6,162,909, U.S. Pat. No. 6,303,773, or Scaringe supra, incorporated by reference herein in their entireties. Additionally, deprotection conditions can be modified to provide the best possible yield and purity of siNA constructs. For example, applicant has observed that oligonucleotides comprising 2′-deoxy-2′-fluoro nucleotides can degrade under inappropriate deprotection conditions. Such oligonucleotides are deprotected using aqueous methylamine at about 35° C. for 30 minutes. If the 2′-deoxy-2′-fluoro containing oligonucleotide also comprises ribonucleotides, after deprotection with aqueous methylamine at about 35° C. for 30 minutes, TEA-HF is added and the reaction maintained at about 65° C. for an additional 15 minutes.

### Example 6

### RNAi In Vitro Assay to Assess siNA Activity

[0507] An in vitro assay that recapitulates RNAi in a cell-free system is used to evaluate siNA constructs targeting HDAC RNA targets. The assay comprises the system described by Tuschl et al., 1999, Genes and Development, 13, 3191-3197 and Zamore et al., 2000, Cell, 101, 25-33 adapted for use with a target RNA. A Drosophila extract derived from syncytial blastoderm is used to reconstitute RNAi activity in vitro. Target RNA is generated via in vitro transcription from an appropriate target expressing plasmid using T7 RNA polymerase or via chemical synthesis as described herein. Sense and antisense siNA strands (for example 20 uM each) are annealed by incubation in buffer (such as 100 mM potassium acetate, 30 mM HEPES-KOH, pH 7.4, 2 mM magnesium acetate) for 1 minute at 90° C. followed by 1 hour at 37° C., then diluted in lysis buffer (for example 100 mM potassium acetate, 30 mM HEPES-KOH at pH 7.4, 2 mM magnesium acetate). Annealing can be monitored by gel electrophoresis on an agarose gel in TBE buffer and stained with ethidium bromide. The Drosophila lysate is prepared using zero to two-hour-old embryos from Oregon R flies collected on yeasted molasses agar that are dechorionated and lysed. The lysate is centrifuged and the supernatant isolated. The assay comprises a reaction mixture containing 50% lysate [vol/vol], RNA (10-50 pM final concentration), and 10% [vol/vol] lysis buffer containing siNA (10 nM final concentration). The reaction mixture also contains 10 mM creatine phosphate, 10 ug/ml creatine phosphokinase, 100 um GTP, 100 uM UTP, 100 uM CTP, 500 uM ATP, 5 mM DTT, 0.1 U/uL RNasin (Promega), and 100 uM of each amino acid. The final concentration of potassium acetate is adjusted to 100 mM. The reactions are pre-assembled on ice and preincubated at 25° C. for 10 minutes before adding RNA, then incubated at 25° C. for an additional 60 minutes. Reactions are quenched with 4 volumes of 1.25×Passive Lysis Buffer (Promega). Target RNA cleavage is assayed by RT-PCR analysis or other methods known in the art and are compared to control reactions in which siNA is omitted from the reaction.

[0508] Alternately, internally-labeled target RNA for the assay is prepared by in vitro transcription in the presence of [alpha-³²P] CTP, passed over a G50 Sephadex column by spin chromatography and used as target RNA without further purification. Optionally, target RNA is 5′-³²P-end labeled using T4 polynucleotide kinase enzyme. Assays are performed as described above and target RNA and the specific RNA cleavage products generated by RNAi are visualized on an autoradiograph of a gel. The percentage of cleavage is determined by PHOSPHOR IMAGER® (autoradiography) quantitation of bands representing intact control RNA or RNA from control reactions without siNA and the cleavage products generated by the assay.

[0509] In one embodiment, this assay is used to determine target sites in the HDAC RNA target for siNA mediated RNAi cleavage, wherein a plurality of siNA constructs are screened for RNAi mediated cleavage of the HDAC RNA target, for example, by analyzing the assay reaction by electrophoresis of labeled target RNA, or by northern blotting, as well as by other methodology well known in the art.

### Example 7

### Nucleic Acid Inhibition of HDAC RNA In Vivo

[0510] siNA molecules targeted to the human HDAC RNA are designed and synthesized as described above. These nucleic acid molecules can be tested for cleavage activity in vivo, for example, using the following procedure.

[0511] Two formats are used to test the efficacy of siNAs against a given target (e.g., HDAC 11). First, the reagents are tested in cell culture using, for example, Jurkat, HeLa, A549 or 293T cells, to determine the extent of RNA and protein inhibition. siNA reagents are selected against the target HDAC 11 RNA as described herein. RNA inhibition is measured after delivery of these reagents by a suitable transfection agent to, for example, Jurkat, HeLa, A549 or 293T cells. Relative amounts of target RNA are measured versus actin using real-time PCR monitoring of amplification (eg., ABI 7700 TAQMAN®). A comparison is made to a mixture of oligonucleotide sequences made to unrelated targets or to a randomized siNA control with the same overall length and chemistry, but randomly substituted at each position. Primary and secondary lead reagents are chosen for the target and optimization performed. After an optimal transfection agent concentration is chosen, a RNA time-course of inhibition is performed with the lead siNA molecule. In addition, a cell-plating format can be used to determine RNA inhibition.

Delivery of siNA to Cells

[0512] Cells (e.g., Jurkat, HeLa, A549 or 293T cells) are seeded, for example, at 1×10⁵ cells per well of a six-well dish in EGM-2 (BioWhittaker) the day before transfection. siNA (final concentration, for example 20 nM) and cationic lipid (e.g., final concentration 2 μg/ml) are complexed in EGM basal media (Biowhittaker) at 37° C. for 30 minutes in polystyrene tubes. Following vortexing, the complexed siNA is added to each well and incubated for the times indicated. For initial optimization experiments, cells are seeded, for example, at 1×13 in 96 well plates and siNA complex added as described. Efficiency of delivery of siNA to cells is determined using a fluorescent siNA complexed with lipid. Cells in 6-well dishes are incubated with siNA for 24 hours, rinsed with PBS and fixed in 2% paraformaldehyde for 15 minutes at room temperature. Uptake of siNA is visualized using a fluorescent microscope.

TAQMAN® (Real-Time PCR Monitoring of Amplification) and Lightcycler Quantification of mRNA

[0513] Total RNA is prepared from cells following siNA delivery, for example, using Qiagen RNA purification kits for 6-well or Rneasy extraction kits for 96-well assays. For TAQMAN® analysis (real-time PCR monitoring of amplification), dual-labeled probes are synthesized with the reporter dye, FAM or JOE, covalently linked at the 5′-end and the quencher dye TAMRA conjugated to the 3′-end. One-step RT-PCR amplifications are performed on, for example, an ABI PRISM 7700 Sequence Detector using 50 μl reactions consisting of 10 μl total RNA, 100 nM forward primer, 900 nM reverse primer, 100 nM probe, 1×TaqMan PCR reaction buffer (PE-Applied Biosystems), 5.5 mM MgCl₂, 300 μM each dATP, dCTP, dGTP, and dTTP, 10 U RNase Inhibitor (Promega), 1.25 U AMPLITAQ GOLD® (DNA polymerase) (PE-Applied Biosystems) and 10 U M-MLV Reverse Transcriptase (Promega). The thermal cycling conditions can consist of 30 minutes at 48° C., 10 minutes at 95° C., followed by 40 cycles of 15 seconds at 95° C. and 1 minute at 60° C. Quantitation of mRNA levels is determined relative to standards generated from serially diluted total cellular RNA (300, 100, 33, 11 ng/reaction) and normalizing to β-actin or GAPDH mRNA in parallel TAQMAN® reactions (real-time PCR monitoring of amplification). For each gene of interest an upper and lower primer and a fluorescently labeled probe are designed. Real time incorporation of SYBR Green I dye into a specific PCR product can be measured in glass capillary tubes using a lightcyler. A standard curve is generated for each primer pair using control cRNA. Values are represented as relative expression to GAPDH in each sample.

Western Blotting

[0514] Nuclear extracts can be prepared using a standard micro preparation technique (see for example Andrews and Faller, 1991, Nucleic Acids Research, 19, 2499). Protein extracts from supernatants are prepared, for example using TCA precipitation. An equal volume of 20% TCA is added to the cell supernatant, incubated on ice for 1 hour and pelleted by centrifugation for 5 minutes. Pellets are washed in acetone, dried and resuspended in water. Cellular protein extracts are run on a 10% Bis-Tris NuPage (nuclear extracts) or 4-12% Tris-Glycine (supernatant extracts) polyacrylamide gel and transferred onto nitro-cellulose membranes. Non-specific binding can be blocked by incubation, for example, with 5% non-fat milk for 1 hour followed by primary antibody for 16 hour at 4° C. Following washes, the secondary antibody is applied, for example (1:10,000 dilution) for 1 hour at room temperature and the signal detected with SuperSignal reagent (Pierce).

### Example 8

### Models Useful to Evaluate the Down-Regulation of Target Gene Expression

[0515] Evaluating the efficacy of siNA molecules of the invention in animal models is an important prerequisite to human clinical trials. Various animal models of cancer, proliferative, ocular, etc. diseases, conditions, or disorders as are known in the art can be adapted for use for pre-clinical evaluation of the efficacy of nucleic acid compositions of the invetention in modulating target gene expression toward therapeutic, cosmetic, or research use. Non-limiting examples of pre-models useful in evaluating HDAC inhibitory compounds for therapeutic use can be found in Acharya et al., 2005, Molecular Pharmacology Fast Forward, June 14, 1-49; Curtin and Glaser, 2003, Curr. Med. Chem., 10, 2372-92; and Filocamo et al., International PCT Publication No. WO 05/071079, all incorporated by reference herein.

### Example 9

### RNAi Mediated Inhibition of Target Gene Expression

In Vitro siNA Mediated Inhibition of HDAC RNA

[0516] siNA constructs are tested for efficacy in reducing target RNA expression in cells, (e.g., HEKn/HEKa, HeLa, A549, A375 cells). Cells are plated approximately 24 hours before transfection in 96-well plates at 5,000-7,500 cells/well, 100 μl/well, such that at the time of transfection cells are 70-90% confluent. For transfection, annealed siNAs are mixed with the transfection reagent (e.g., Lipofectamine 2000, Invitrogen) in a volume of 50 μl/well and incubated for 20 minutes at room temperature. The siNA transfection mixtures are added to cells to give a final siNA concentration of 25 nM in a volume of 150 μl. Each siNA transfection mixture is added to 3 wells for triplicate siNA treatments. Cells are incubated at 37° for 24 hours in the continued presence of the siNA transfection mixture. At 24 hours, RNA is prepared from each well of treated cells. The supernatants with the transfection mixtures are first removed and discarded, then the cells are lysed and RNA prepared from each well. Target gene expression following treatment is evaluated by RT-PCR for the target gene and for a control gene (36B4, an RNA polymerase subunit) for normalization. The triplicate data is averaged and the standard deviations determined for each treatment. Normalized data are graphed and the percent reduction of target mRNA by active siNAs in comparison to their respective inverted control siNAs is determined.

### Example 10

### Indications

[0517] Particular conditions and disease states that are associated with HDAC gene expression modulation using siNA molecules of the invention include, but are not limited to cancer, proliferative, ocular, allograft rejection and age related diseases, conditions, or disorders as described herein or otherwise known in the art, and any other diseases, conditions or disorders that are related to or will respond to the levels of a HDAC (e.g., HDAC target protein or target polynucleotide) in a cell or tissue, alone or in combination with other therapies.

### Example 11

### Multifunctional siNA Inhibition of Target RNA Expression

Multifunctional siNA Design

[0518] Once target sites have been identified for multifunctional siNA constructs, each strand of the siNA is designed with a complementary region of length, for example, of about 18 to about 28 nucleotides, that is complementary to a different target nucleic acid sequence. Each complementary region is designed with an adjacent flanking region of about 4 to about 22 nucleotides that is not complementary to the target sequence, but which comprises complementarity to the complementary region of the other sequence (see for example FIG. 16). Hairpin constructs can likewise be designed (see for example FIG. 17). Identification of complementary, palindrome or repeat sequences that are shared between the different target nucleic acid sequences can be used to shorten the overall length of the multifunctional siNA constructs (see for example FIGS. 18 and 19).

[0519] In a non-limiting example, three additional categories of additional multifunctional siNA designs are presented that allow a single siNA molecule to silence multiple targets. The first method utilizes linkers to join siNAs (or multiunctional siNAs) in a direct manner. This can allow the most potent siNAs to be joined without creating a long, continuous stretch of RNA that has potential to trigger an interferon response. The second method is a dendrimeric extension of the overlapping or the linked multifunctional design; or alternatively the organization of siNA in a supramolecular format. The third method uses helix lengths greater than 30 base pairs. Processing of these siNAs by Dicer will reveal new, active 5′ antisense ends. Therefore, the long siNAs can target the sites defined by the original 5′ ends and those defined by the new ends that are created by Dicer processing. When used in combination with traditional multifunctional siNAs (where the sense and antisense strands each define a target) the approach can be used for example to target 4 or more sites.

I. Tethered Bifunctional siNAs

[0520] The basic idea is a novel approach to the design of multifunctional siNAs in which two antisense siNA strands are annealed to a single sense strand. The sense strand oligonucleotide contains a linker (e.g., non-nulcoetide linker as described herein) and two segments that anneal to the antisense siNA strands (see FIG. 22). The linkers can also optionally comprise nucleotide-based linkers. Several potential advantages and variations to this approach include, but are not limited to:
[0521] 1. The two antisense siNAs are independent. Therefore, the choice of target sites is not constrained by a requirement for sequence conservation between two sites. Any two highly active siNAs can be combined to form a multifunctional siNA.
[0522] 2. When used in combination with target sites having homology, siNAs that target a sequence present in two genes (e.g., different isoforms), the design can be used to target more than two sites. A single multifunctional siNA can be, for example, used to target RNA of two different target RNAs.
[0523] 3. Multifunctional siNAs that use both the sense and antisense strands to target a gene can also be incorporated into a tethered multifuctional design. This leaves open the possibility of targeting 6 or more sites with a single complex.
[0524] 4. It can be possible to anneal more than two antisense strand siNAs to a single tethered sense strand.
[0525] 5. The design avoids long continuous stretches of dsRNA. Therefore, it is less likely to initiate an interferon response.
[0526] 6. The linker (or modifications attached to it, such as conjugates described herein) can improve the pharmacokinetic properties of the complex or improve its incorporation into liposomes. Modifications introduced to the linker should not impact siNA activity to the same extent that they would if directly attached to the siNA (see for example FIGS. 27 and 28).
[0527] 7. The sense strand can extend beyond the annealed antisense strands to provide additional sites for the attachment of conjugates.
[0528] 8. The polarity of the complex can be switched such that both of the antisense 3′ ends are adjacent to the linker and the 5′ ends are distal to the linker or combination thereof.
   Dendrimer and Supramolecular siNAs

[0529] In the dendrimer siNA approach, the synthesis of siNA is initiated by first synthesizing the dendrimer template followed by attaching various functional siNAs. Various constructs are depicted in FIG. 23. The number of functional siNAs that can be attached is only limited by the dimensions of the dendrimer used.

Supramolecular Approach to Multifunctional siNA

[0530] The supramolecular format simplifies the challenges of dendrimer synthesis. In this format, the siNA strands are synthesized by standard RNA chemistry, followed by annealing of various complementary strands. The individual strand synthesis contains an antisense sense sequence of one siNA at the 5′-end followed by a nucleic acid or synthetic linker, such as hexaethyleneglyol, which in turn is followed by sense strand of another siNA in 5′ to 3′ direction. Thus, the synthesis of siNA strands can be carried out in a standard 3′ to 5′ direction. Representative examples of trifunctional and tetrafunctional siNAs are depicted in FIG. 24. Based on a similar principle, higher functionality siNA constucts can be designed as long as efficient annealing of various strands is achieved.

Dicer Enabled Multifunctional siNA

[0531] Using bioinformatic analysis of multiple targets, stretches of identical sequences shared between differeing target sequences can be identified ranging from about two to about fourteen nucleotides in length. These identical regions can be designed into extended siNA helixes (e.g., >30 base pairs) such that the processing by Dicer reveals a secondary functional 5′-antisense site (see for example FIG. 25). For example, when the first 17 nucleotides of a siNA antisense strand (e.g., 21 nucleotide strands in a duplex with 3′-TT overhangs) are complementary to a target RNA, robust silencing was observed at 25 nM. 80% silencing was observed with only 16 nucleotide complementarity in the same format.

[0532] Incorporation of this property into the designs of siNAs of about 30 to 40 or more base pairs results in additional multifunctional siNA constructs. The example in FIG. 25 illustrates how a 30 base-pair duplex can target three distinct sequences after processing by Dicer-RNaseIII; these sequences can be on the same mRNA or separate RNAs, such as viral and host factor messages, or multiple points along a given pathway (e.g., inflammatory cascades). Furthermore, a 40 base-pair duplex can combine a bifunctional design in tandem, to provide a single duplex targeting four target sequences. An even more extensive approach can include use of homologous sequences to enable five or six targets silenced for one multifunctional duplex. The example in FIG. 25 demonstrates how this can be achieved. A 30 base pair duplex is cleaved by Dicer into 22 and 8 base pair products from either end (8 b.p. fragments not shown). For ease of presentation the overhangs generated by dicer are not shown—but can be compensated for. Three targeting sequences are shown. The required sequence identity overlapped is indicated by grey boxes. The N's of the parent 30 b.p. siNA are suggested sites of 2′-OH positions to enable Dicer cleavage if this is tested in stabilized chemistries. Note that processing of a 30mer duplex by Dicer RNase III does not give a precise 22+8 cleavage, but rather produces a series of closely related products (with 22+8 being the primary site). Therefore, processing by Dicer will yield a series of active siNAs. Another non-limiting example is shown in FIG. 26. A 40 base pair duplex is cleaved by Dicer into 20 base pair products from either end. For ease of presentation the overhangs generated by dicer are not shown—but can be compensated for. Four targeting sequences are shown in four colors, blue, light-blue and red and orange. The required sequence identity overlapped is indicated by grey boxes. This design format can be extended to larger RNAs. If chemically stabilized siNAs are bound by Dicer, then strategically located ribonucleotide linkages can enable designer cleavage products that permit our more extensive repertoire of multiifunctional designs. For example cleavage products not limited to the Dicer standard of approximately 22-nucleotides can allow multifunctional siNA constructs with a target sequence identity overlap ranging from, for example, about 3 to about 15 nucleotides.

### Example 12

### Diagnostic Uses

[0533] The siNA molecules of the invention can be used in a variety of diagnostic applications, such as in the identification of molecular targets (e.g., RNA) in a variety of applications, for example, in clinical, industrial, environmental, agricultural and/or research settings. Such diagnostic use of siNA molecules involves utilizing reconstituted RNAi systems, for example, using cellular lysates or partially purified cellular lysates. siNA molecules of this invention can be used as diagnostic tools to examine genetic drift and mutations within diseased cells or to detect the presence of endogenous or exogenous, for example viral, RNA in a cell. The close relationship between siNA activity and the structure of the target RNA allows the detection of mutations in any region of the molecule, which alters the base-pairing and three-dimensional structure of the target RNA. By using multiple siNA molecules described in this invention, one can map nucleotide changes, which are important to RNA structure and function in vitro, as well as in cells and tissues. Cleavage of target RNAs with siNA molecules can be used to inhibit gene expression and define the role of specified gene products in the progression of disease or infection. In this manner, other genetic targets can be defined as important mediators of the disease. These experiments will lead to better treatment of the disease progression by affording the possibility of combination therapies (e.g., multiple siNA molecules targeted to different genes, siNA molecules coupled with known small molecule inhibitors, or intermittent treatment with combinations siNA molecules and/or other chemical or biological molecules). Other in vitro uses of siNA molecules of this invention are well known in the art, and include detection of the presence of mRNAs associated with a disease, infection, or related condition. Such RNA is detected by determining the presence of a cleavage product after treatment with a siNA using standard methodologies, for example, fluorescence resonance emission transfer (FRET).

[0534] In a specific example, siNA molecules that cleave only wild-type or mutant forms of the target RNA are used for the assay. The first siNA molecules (i.e., those that cleave only wild-type forms of target RNA) are used to identify wild-type RNA present in the sample and the second siNA molecules (i.e., those that cleave only mutant forms of target RNA) are used to identify mutant RNA in the sample. As reaction controls, synthetic substrates of both wild-type and mutant RNA are cleaved by both siNA molecules to demonstrate the relative siNA efficiencies in the reactions and the absence of cleavage of the “non-targeted” RNA species. The cleavage products from the synthetic substrates also serve to generate size markers for the analysis of wild-type and mutant RNAs in the sample population. Thus, each analysis requires two siNA molecules, two substrates and one unknown sample, which is combined into six reactions. The presence of cleavage products is determined using an RNase protection assay so that full-length and cleavage fragments of each RNA can be analyzed in one lane of a polyacrylamide gel. It is not absolutely required to quantify the results to gain insight into the expression of mutant RNAs and putative risk of the desired phenotypic changes in target cells. The expression of mRNA whose protein product is implicated in the development of the phenotype (i.e., disease related or infection related) is adequate to establish risk. If probes of comparable specific activity are used for both transcripts, then a qualitative comparison of RNA levels is adequate and decreases the cost of the initial diagnosis. Higher mutant form to wild-type ratios are correlated with higher risk whether RNA levels are compared qualitatively or quantitatively.

[0535] All patents and publications mentioned in the specification are indicative of the levels of skill of those skilled in the art to which the invention pertains. All references cited in this disclosure are incorporated by reference to the same extent as if each reference had been incorporated by reference in its entirety individually.

[0536] One skilled in the art would readily appreciate that the present invention is well adapted to carry out the objects and obtain the ends and advantages mentioned, as well as those inherent therein. The methods and compositions described herein as presently representative of preferred embodiments are exemplary and are not intended as limitations on the scope of the invention. Changes therein and other uses will occur to those skilled in the art, which are encompassed within the spirit of the invention, are defined by the scope of the claims.

[0537] It will be readily apparent to one skilled in the art that varying substitutions and modifications can be made to the invention disclosed herein without departing from the scope and spirit of the invention. Thus, such additional embodiments are within the scope of the present invention and the following claims. The present invention teaches one skilled in the art to test various combinations and/or substitutions of chemical modifications described herein toward generating nucleic acid constructs with improved activity for mediating RNAi activity. Such improved activity can comprise improved stability, improved bioavailability, and/or improved activation of cellular responses mediating RNAi. Therefore, the specific embodiments described herein are not limiting and one skilled in the art can readily appreciate that specific combinations of the modifications described herein can be tested without undue experimentation toward identifying siNA molecules with improved RNAi activity.

[0538] The invention illustratively described herein suitably can be practiced in the absence of any element or elements, limitation or limitations that are not specifically disclosed herein. Thus, for example, in each instance herein any of the terms “comprising”, “consisting essentially of”, and “consisting of” may be replaced with either of the other two terms. The terms and expressions which have been employed are used as terms of description and not of limitation, and there is no intention that in the use of such terms and expressions of excluding any equivalents of the features shown and described or portions thereof, but it is recognized that various modifications are possible within the scope of the invention claimed. Thus, it should be understood that although the present invention has been specifically disclosed by preferred embodiments, optional features, modification and variation of the concepts herein disclosed may be resorted to by those skilled in the art, and that such modifications and variations are considered to be within the scope of this invention as defined by the description and the appended claims.

[0539] In addition, where features or aspects of the invention are described in terms of Markush groups or other grouping of alternatives, those skilled in the art will recognize that the invention is also thereby described in terms of any individual member or subgroup of members of the Markush group or other group.

TABLE I
HDAC Accession Numbers

| | |
|---|---|
| NM_004964 | Homo sapiens histone deacetylase 1 (HDAC1), mRNA |
| NM_001527 | Homo sapiens histone deacetylase 2 (HDAC2), mRNA |
| NM_024665 | Homo sapiens nuclear receptor co-repressor/HDAC3 complex subunit (FLJ12894), |
| | mRNA |
| NM_003883 | Homo sapiens histone deacetylase 3 (HDAC3), mRNA |
| NM_006037 | Homo sapiens histone deacetylase 4 (HDAC4), mRNA |
| NM_005474 | Homo sapiens histone deacetylase 5 (HDAC5), mRNA |
| NM_139205 | Homo sapiens histone deacetylase 5 (HDAC5), transcript variant 2, mRNA |
| NM_006044 | Homo sapiens histone deacetylase 6 (HDAC6), mRNA |
| NM_016596 | Homo sapiens histone deacetylase 7A (HDAC7A), transcript variant 2, mRNA |
| NM_015401 | Homo sapiens histone deacetylase 7A (HDAC7A), transcript variant 1, mRNA |
| NM_018486 | Homo sapiens histone deacetylase 8 (HDAC8), mRNA |
| NM_058177 | Homo sapiens histone deacetylase 9 (HDAC9-PENDING), transcript variant 2, |
| | mRNA |
| NM_058176 | Homo sapiens histone deacetylase 9 (HDAC9-PENDING), transcript variant 1, |
| | mRNA |
| NM_014707 | Homo sapiens histone deacetylase 9 (HDAC9-PENDING), transcript variant 3, |
| | mRNA |
| NM_178423 | Homo sapiens histone deacetylase 9 (HDAC9), transcript variant 4, mRNA |
| NM_178425 | Homo sapiens histone deacetylase 9 (HDAC9), transcript variant 5, mRNA |
| NM_032019 | Homo sapiens histone deacetylase 10 (HDAC10), mRNA |
| NM_024827 | Homo sapiens histone deacetylase 11 (HDAC11), mRNA |
| NM_012238 | Homo sapiens sirtuin (silent mating type information regulation 2 homolog) 1 (S. cerevisiae) |
| | (SIRT1), mRNA |
| NM_012237 | Homo sapiens sirtuin (silent mating type information regulation 2 homolog) 2 (S. cerevisiae) |
| | (SIRT2), transcript variant 1, mRNA |
| NM_030593 | Homo sapiens sirtuin (silent mating type information regulation 2 homolog) 2 (S. cerevisiae) |
| | (SIRT2), transcript variant 2, mRNA |
| NM_012239 | Homo sapiens sirtuin (silent mating type information regulation 2 homolog) 3 (S. cerevisiae) |
| | (SIRT3), mRNA |
| NM_012240 | Homo sapiens sirtuin (silent mating type information regulation 2 homolog) 4 (S. cerevisiae) |
| | (SIRT4), mRNA |
| NM_012241 | Homo sapiens sirtuin (silent mating type information regulation 2 homolog) 5 (S. cerevisiae) |
| | (SIRT5), transcript variant 1, mRNA |
| NM_031244 | Homo sapiens sirtuin (silent mating type information regulation 2 homolog) 5 (S. cerevisiae) |
| | (SIRT5), transcript variant 2, mRNA |
| XM_372781 | Homo sapiens similar to NAD-dependent deacetylase sirtuin 5 (SIR2-like protein 5) |
| | (LOC391047), mRNA |
| NM_016539 | Homo sapiens sirtuin (silent mating type information regulation 2 homolog) 6 (S. cerevisiae) |
| | (SIRT6), mRNA |
| NM_016538 | Homo sapiens sirtuin (silent mating type information regulation 2 homolog) 7 (S. cerevisiae) |
| | (SIRT7), mRNA |

[0540] TABLE II

HDAC siNA and Target Sequences

| | | | | | | | | |
|---|---|---|---|---|---|---|---|---|
| | | Seq | | | Seq | | | Seq |
| Pos | Seq | ID | UPos | Upper seq | ID | LPos | Lower seq | ID |

HDAC1: NM_004964.2

| | | | | | | | | |
|---|---|---|---|---|---|---|---|---|
| 3 | GCGGAGCCGCGGGCGGGAG | 1 | 3 | GCGGAGCCGCGGGCGGGAG | 1 | 21 | CUCCCGCCCGCGGCUCCGC | 116 |
| 21 | GGGCGGACGGACCGACUGA | 2 | 21 | GGGCGGACGGACCGACUGA | 2 | 39 | UCAGUCGGUCCGUCCGCCC | 117 |
| 39 | ACGGUAGGGACGGGAGGCG | 3 | 39 | ACGGUAGGGACGGGAGGCG | 3 | 57 | CGCCUCCCGUCCCUACCGU | 118 |
| 57 | GAGCAAGAUGGCGCAGACG | 4 | 57 | GAGCAAGAUGGCGCAGACG | 4 | 75 | CGUCUGCGCCAUCUUGCUC | 119 |
| 75 | GCAGGGCACCCGGAGGAAA | 5 | 75 | GCAGGGCACCCGGAGGAAA | 5 | 93 | UUUCCUCCGGGUGCCCUGC | 120 |
| 93 | AGUCUGUUACUACUACGAC | 6 | 93 | AGUCUGUUACUACUACGAC | 6 | 111 | GUCGUAGUAGUAACAGACU | 121 |
| 111 | CGGGGAUGUUGGAAAUUAC | 7 | 111 | CGGGGAUGUUGGAAAUUAC | 7 | 129 | GUAAUUUCCAACAUCCCCG | 122 |
| 129 | CUAUUAUGGACAAGGCCAC | 8 | 129 | CUAUUAUGGACAAGGCCAC | 8 | 147 | GUGGCCUUGUCCAUAAUAG | 123 |
| 147 | CCCAAUGAAGCCUCACCGA | 9 | 147 | CCCAAUGAAGCCUCACCGA | 9 | 165 | UCGGUGAGGCUUCAUUGGG | 124 |
| 165 | AAUCCGCAUGACUCAUAAU | 10 | 165 | AAUCCGCAUGACUCAUAAU | 10 | 183 | AUUAUGAGUCAUGCGGAUU | 125 |
| 183 | UUUGGUGCUCAACUAUGGU | 11 | 183 | UUUGCUGCUCAAGUAUGGU | 11 | 201 | ACCAUAGUUGAGCAGCAAA | 126 |
| 201 | UCUCUACCGAAAAAUGGAA | 12 | 201 | UCUCUACCGAAAAAUGGAA | 12 | 219 | UUCCAUUUUUCGGUAGAGA | 127 |
| 219 | AAUCUAUCGCCCUCACAAA | 13 | 219 | AAUCUAUCGCCCUCACAAA | 13 | 237 | UUUGUGAGGGCGAUAGAUU | 128 |
| 237 | AGCCAAUGCUGAGGAGAUG | 14 | 237 | AGCCAAUGCUGAGGAGAUG | 14 | 255 | CAUCUCCUCAGCAUUGGCU | 129 |
| 255 | GACCAAGUACCACAGCGAU | 15 | 255 | GACCAAGUACCACAGCGAU | 15 | 273 | AUCGCUGUGGUACUUGGUC | 130 |
| 273 | UGACUACAUUAAAUUCUUG | 16 | 273 | UGACUACAUUAAAUUCUUG | 16 | 291 | CAAGAAUUUAAUGUAGUCA | 131 |
| 291 | GCGCUCCAUCCGUCCAGAU | 17 | 291 | GCGCUCCAUCCGUCCAGAU | 17 | 309 | AUCUGGACGGAUGGAGCGC | 132 |
| 309 | UAACAUGUCGGAGUACAGC | 18 | 309 | UAACAUGUCGGAGUACAGC | 18 | 327 | GGUGUACUCCGACAUGUUA | 133 |
| 327 | CAAGCAGAUGCAGAGAUUC | 19 | 327 | CAAGCAGAUGCAGAGAUUC | 19 | 345 | GAAUCUCUGCAUCUGCUUG | 134 |
| 345 | CAACGUUGGUGAGGACUGU | 20 | 345 | CAACGUUGGUGAGGACUGU | 20 | 363 | ACAGUCCUCACCAACGUUG | 135 |
| 363 | UCCAGUAUUCGAUGGCCUG | 21 | 363 | UCCAGUAUUCGAUGGCCUG | 21 | 381 | CAGGCCAUCGAAUACUGGA | 136 |
| 381 | GUUUGAGUUCUGUCAGUUG | 22 | 381 | GUUUGAGUUCUGUCAGUUG | 22 | 399 | CAACUGACAGAACUCAAAC | 137 |
| 399 | GUCUACUGGUGGUUCUGUG | 23 | 399 | GUCUACUGGUGGUUCUGUG | 23 | 417 | CACAGAACCACCAGUAGAC | 138 |
| 417 | GGCAAGUGCUGUGAAACUU | 24 | 417 | GGCAAGUGCUGUGAAACUU | 24 | 435 | AAGUUUCACAGCACUUGCC | 139 |
| 435 | UAAUAAGCAGCAGACGGAC | 25 | 435 | UAAUAAGCAGCAGACGGAC | 25 | 453 | GUCCGUCUGCUGCUUAUUA | 140 |
| 453 | CAUCGCUGUGAAUUGGGCU | 26 | 453 | CAUCGCUGUGAAUUGGGCU | 26 | 471 | AGCCCAAUUCACAGCGAUG | 141 |
| 471 | UGGGGGCCUGCACCAUGCA | 27 | 471 | UGGGGGCCUGCACCAUGCA | 27 | 489 | UGCAUGGUGCAGGCCCCCA | 142 |
| 489 | AAAGAAGUCCGAGGCAUCU | 28 | 489 | AAAGAAGUCCGAGGCAUCU | 28 | 507 | AGAUGCCUCGGACUUCUUU | 143 |
| 507 | UGGCUUCUGUUACGUCAAU | 29 | 507 | UGGCUUCUGUUACGUCAAU | 29 | 525 | AUUGACGUAACAGAAGCCA | 144 |
| 525 | UGAUAUCGUCUUGGCCAUC | 30 | 525 | UGAUAUCGUCUUGGCCAUC | 30 | 543 | GAUGGCCAAGACGAUAUCA | 145 |
| 543 | CCUGGAACUGCUAAAGUAU | 31 | 543 | CCUGGAACUGCUAAAGUAU | 31 | 561 | AUACUUUAGCAGUUCCAGG | 146 |
| 561 | UCACCAGAGGGUGCUGUAC | 32 | 561 | UCACCAGAGGGUGCUGUAC | 32 | 579 | GUACAGGACCCUCUGGUGA | 147 |
| 579 | CAUUGACAUUGAUAUUCAC | 33 | 579 | CAUUGACAUUGAUAUUCAC | 33 | 597 | GUGAAUAUCAAUGUCAAUG | 148 |
| 597 | CCAUGGUGACGGCGUGGAA | 34 | 597 | CCAUGGUGACGGCGUGGAA | 34 | 615 | UUCCACGCCGUCACCAUGG | 149 |
| 615 | AGAGGCCUUCUACACCACG | 35 | 615 | AGAGGCCUUCUACACCACG | 35 | 633 | CGUGGUGUAGAAGGCCUCU | 150 |
| 633 | GGACCGGGUCAUGACUGUG | 36 | 633 | GGACCGGGUCAUGACUGUG | 36 | 651 | CACAGUCAUGACCCGGUCC | 151 |
| 651 | GUCCUUUCAUAAGUAUGGA | 37 | 651 | GUCCUUUCAUAAGUAUGGA | 37 | 669 | UCCAUACUUAUGAAAGGAC | 152 |
| 669 | AGAGUACUUCCCAGGAACU | 38 | 669 | AGAGUACUUCCCAGGAACU | 38 | 687 | AGUUCCUGGGAAGUACUCU | 153 |
| 687 | UGGGGACCUACGGGAUAUC | 39 | 687 | UGGGGACCUACGGGAUAUC | 39 | 705 | GAUAUCCCGUAGGUCCCCA | 154 |
| 705 | CGGGGCUGGCAAAGGCAAG | 40 | 705 | CGGGGCUGGCAAAGGCAAG | 40 | 723 | CUUGCCUUUGCCAGCCCCG | 155 |
| 723 | GUAUUAUGCUGUUAACUAC | 41 | 723 | GUAUUAUGCUGUUAACUAC | 41 | 741 | GUAGUUAACAGCAUAAUAC | 156 |
| 741 | CCCGCUCCGAGACGGGAUU | 42 | 741 | CCCGCUCCGAGACGGGAUU | 42 | 759 | AAUCCCGUCUCGGAGCGGG | 157 |
| 759 | UGAUGACGAGUCCUAUGAG | 43 | 759 | UGAUGACGAGUCCUAUGAG | 43 | 777 | CUCAUAGGACUCGUCAUCA | 158 |
| 777 | GGCCAUUUUCAAGCCGGUC | 44 | 777 | GGCCAUUUUCAAGCCGGUC | 44 | 795 | GACCGGCUUGAAAAUGGCC | 159 |
| 795 | CAUGUCCAAAGUAAUGGAG | 45 | 795 | CAUGUCCAAAGUAAUGGAG | 45 | 813 | CUCCAUUACUUUGGACAUG | 160 |
| 813 | GAUGUUCCAGCCUAGUGCG | 46 | 813 | GAUGUUCCAGCCUAGUGCG | 46 | 831 | CGCACUAGGCUGGAACAUC | 161 |
| 831 | GGUGGUCUUACAGUGUGGC | 47 | 831 | GGUGGUCUUACAGUGUGGC | 47 | 849 | GCCACACUGUAAGACCACC | 162 |
| 849 | CUCAGACUCCCUAUCUGGG | 48 | 849 | CUCAGACUCCCUAUCUGGG | 48 | 867 | CCCAGAUAGGGAGUCUGAG | 163 |
| 867 | GGAUCGGUUAGGUUGCUUC | 49 | 867 | GGAUCGGUUAGGUUGCUUC | 49 | 885 | GAAGCAACCUAACCGAUCC | 164 |
| 885 | CAAUCUAACUAUCAAAGGA | 50 | 885 | CAAUCUAACUAUCPAAGGA | 50 | 903 | UCCUUUGAUAGUUAGAUUG | 165 |
| 903 | ACACGCCAAGUGUGUGGAA | 51 | 903 | ACACGCCAAGUGUGUGGAA | 51 | 921 | UUCCACACACUUGGCGUGU | 166 |
| 921 | AUUUGUCAAGAGCUUUAAC | 52 | 921 | AUUUGUCAAGAGCUUUAAC | 52 | 939 | GUUAAAGCUCUUGACAAAU | 167 |
| 939 | CCUGCCUAUGCUGAUGCUG | 53 | 939 | CCUGCCUAUGCUGAUGCUG | 53 | 957 | CAGCAUCAGCAUAGGCAGG | 168 |
| 957 | GGGAGGCGGUGGUUACACC | 54 | 957 | GGGAGGCGGUGGUUACACC | 54 | 975 | GGUGUAACCACCGCCUCCC | 169 |
| 975 | CAUUCGUAACGUUGCCCGG | 55 | 975 | CAUUCGUAACGUUGCCCGG | 55 | 993 | CCGGGCAACGUUACGAAUG | 170 |
| 993 | GUGCUGGACAUAUGAGACA | 56 | 993 | GUGCUGGACAUAUGAGACA | 56 | 1011 | UGUCUCAUAUGUCCAGCAC | 171 |
| 1011 | AGCUGUGGCCCUGGAUACG | 57 | 1011 | AGCUGUGGCCCUGGAUACG | 57 | 1029 | CGUAUCCAGGGCCACAGCU | 172 |
| 1029 | GGAGAUCCCUAAUGAGCUU | 58 | 1029 | GGAGAUCCCUAAUGAGCUU | 58 | 1047 | AAGCUCAUUAGGGAUCUCC | 173 |
| 1047 | UCCAUACAAUGACUACUUU | 59 | 1047 | UCCAUACAAUGACUACUUU | 59 | 1065 | AAAGUAGUCAUUGUAUGGA | 174 |
| 1065 | UGAAUACUUUGGACCAGAU | 60 | 1065 | UGAAUACUUUGGACCAGAU | 60 | 1083 | AUCUGGUCCAAAGUAUUCA | 175 |
| 1083 | UUUCAAGCUCCACAUCAGU | 61 | 1083 | UUUCAAGCUCCACAUCAGU | 61 | 1101 | ACUGAUGUGGAGCUUGAAA | 176 |
| 1101 | UCCUUCCAAUAUGACUAAC | 62 | 1101 | UCCUUCCAAUAUGACUAAC | 62 | 1119 | GUUAGUCAUAUUGGAAGGA | 177 |
| 1119 | CCAGAACACGAAUGAGUAC | 63 | 1119 | CCAGAACACGAAUGAGUAC | 63 | 1137 | GUACUCAUUCGUGUUCUGG | 178 |
| 1137 | CCUGGAGAAGAUCAAACAG | 64 | 1137 | CCUGGAGAAGAUCAAACAG | 64 | 1155 | CUGUUUGAUCUUCUCCAGG | 179 |
| 1155 | GCGACUGUUUGAGAACCUU | 65 | 1155 | GCGACUGUUUGAGAACCUU | 65 | 1173 | AAGGUUCUCAAACAGUCGC | 180 |
| 1173 | UAGAAUGCUGCCGCACGCA | 66 | 1173 | UAGAAUGCUGCCGCACGCA | 66 | 1191 | UGCGUGCGGCAGCAUUCUA | 181 |
| 1191 | ACCUGGGGUCCAAAUGCAG | 67 | 1191 | ACCUGGGGUCCAAAUGCAG | 67 | 1209 | CUGCAUUUGGACCCCAGGU | 182 |
| 1209 | GGCGAUUCCUGAGGACGCC | 68 | 1209 | GGCGAUUCCUGAGGACGCC | 68 | 1227 | GGCGUCCUCAGGAAUCGCC | 183 |
| 1227 | CAUCCCUGAGGAGAGUGGC | 69 | 1227 | CAUCCCUGAGGAGAGUGGC | 69 | 1245 | GCCACUCUCCUCAGGGAUG | 184 |
| 1245 | CGAUGAGGACGAAGACGAC | 70 | 1245 | CGAUGAGGACGAAGAGGAC | 70 | 1263 | GUCGUCUUCGUCCUCAUCG | 185 |
| 1263 | CCCUGACAAGCGCAUCUCG | 71 | 1263 | CCCUGACAAGCGCAUCUCG | 71 | 1281 | CGAGAUGCGCUUGUCAGGG | 186 |
| 1281 | GAUCUGCUCCUCUGACAAA | 72 | 1281 | GAUCUGCUCCUCUGACAAA | 72 | 1299 | UUUGUCAGAGGAGCAGAUC | 187 |
| 1299 | ACGAAUUGCCUGUGAGGAA | 73 | 1299 | ACGAAUUGCCUGUGAGGAA | 73 | 1317 | UUCCUCACAGGCAAUUCGU | 188 |
| 1317 | AGAGUUCUCCGAUUCUGAA | 74 | 1317 | AGAGUUCUCCGAUUCUGAA | 74 | 1335 | UUCAGAAUCGGAGAACUCU | 189 |
| 1335 | AGAGGAGGGAGAGGGGGGC | 75 | 1335 | AGAGGAGGGAGAGGGGGGC | 75 | 1353 | GCCCCCCUCUCCCUCCUCU | 190 |
| 1353 | CCGCAAGAACUCUUCCAAC | 76 | 1353 | CCGCAAGAACUCUUCCAAC | 76 | 1371 | GUUGGAAGAGUUCUUGCGG | 191 |
| 1371 | CUUCAAAAAAGCCAAGAGA | 77 | 1371 | CUUCAAAAAAGCCAAGAGA | 77 | 1389 | UCUCUUGGCUUUUUUGAAG | 192 |
| 1389 | AGUCAAAACAGAGGAUGAA | 78 | 1389 | AGUCAAAACAGAGGAUGAA | 78 | 1407 | UUCAUCCUCUGUUUUGACU | 193 |
| 1407 | AAAAGAGAAAGACCCAGAG | 79 | 1407 | AAAAGAGAAAGACCCAGAG | 79 | 1425 | CUCUGGGUCUUUCUCUUUU | 194 |
| 1425 | GGAGAAGAAAGAAGUCACC | 80 | 1425 | GGAGAAGAAAGAAGUCACC | 80 | 1443 | GGUGACUUCUUUCUUCUCC | 195 |
| 1443 | CGAAGAGGAGAAAACCAAG | 81 | 1443 | CGAAGAGGAGAAAACCAAG | 81 | 1461 | CUUGGUUUUCUCCUCUUCG | 196 |
| 1461 | GGAGGAGAAGCCAGAAGCC | 82 | 1461 | GGAGGAGAAGCCAGAAGCC | 82 | 1479 | GGCUUCUGGCUUCUCCUCC | 197 |
| 1479 | CAAAGGGGUCAAGGAGGAG | 83 | 1479 | CAAAGGGGUCAAGGAGGAG | 83 | 1497 | CUCCUCCUUGACCCCUUUG | 198 |
| 1497 | GGUCAAGUUGGCCUGAAUG | 84 | 1497 | GGUCAAGUUGGCCUGAAUG | 84 | 1515 | CAUUCAGGCCAACUUGACC | 199 |
| 1515 | GGACCUCUCCAGCUCUGGC | 85 | 1515 | GGACCUCUCCAGCUCUGGC | 85 | 1533 | GCCAGAGCUGGAGAGGUCC | 200 |
| 1533 | CUUCCUGCUGAGUCCCUCA | 86 | 1533 | CUUCCUGCUGAGUCCCUCA | 86 | 1551 | UGAGGGACUCAGCAGGAAG | 201 |
| 1551 | ACGUUUCUUCCCCAACCCC | 87 | 1551 | ACGUUUCUUCCCCAACCCC | 87 | 1569 | GGGGUUGGGGAAGAAACGU | 202 |
| 1569 | CUCAGAUUUUAUAUUUUCU | 88 | 1569 | CUCAGAUUUUAUAUUUUCU | 88 | 1587 | AGAAAAUAUAAAAUCUGAG | 203 |
| 1587 | UAUUUCUCUGUGUAUUUAU | 89 | 1587 | UAUUUCUCUGUGUAUUUAU | 89 | 1605 | AUAAAUACACAGAGAAAUA | 204 |
| 1605 | UAUAAAAAUUUAUUAAAUA | 90 | 1605 | UAUAAAAAUUUAUUAAAUA | 90 | 1623 | UAUUUAAUAAAUUUUUAUA | 205 |
| 1623 | AUAAAUAUCCCCAGGGACA | 91 | 1623 | AUAAAUAUCCCCAGGGACA | 91 | 1641 | UGUCCCUGGGGAUAUUUAU | 206 |
| 1641 | AGAAACCAAGGCCCCGAGC | 92 | 1641 | AGAAACCAAGGCCCCGAGC | 92 | 1659 | GCUCGGGGCCUUGGUUUCU | 207 |
| 1659 | CUCAGGGCAGCUGUGCUGG | 93 | 1659 | CUCAGGGCAGCUGUGCUGG | 93 | 1677 | CCAGCACAGCUGCCCUGAG | 208 |
| 1677 | GGUGAGCUCUUCCAGGAGC | 94 | 1677 | GGUGAGCUCUUCCAGGAGC | 94 | 1695 | GCUCCUGGAAGAGCUCACC | 209 |
| 1695 | CCACCUUGCCACCCAUUCU | 95 | 1695 | CCACCUUGCCACCCAUUCU | 95 | 1713 | AGAAUGGGUGGCAAGGUGG | 210 |
| 1713 | UUCCCGUUCUUAACUUUGA | 96 | 1713 | UUCCCGUUCUUAACUUUGA | 96 | 1731 | UCAAAGUUAAGAACGGGAA | 211 |
| 1731 | AACCAUAAAGGGUGCCAGG | 97 | 1731 | AACCAUAAAGGGUGCCAGG | 97 | 1749 | CCUGGCACCCUUUAUGGUU | 212 |
| 1749 | GUCUGGGUGAAAGGGAUAC | 98 | 1749 | GUCUGGGUGAAAGGGAUAC | 98 | 1767 | GUAUCCCUUUGACCCAGAC | 213 |
| 1767 | CUUUUAUGCAACCAUAAGA | 99 | 1767 | CUUUUAUGCAACCAUAAGA | 99 | 1785 | UCUUAUGGUUGCAUAAAAG | 214 |
| 1785 | ACAAACUCCUGAAAUGCCA | 100 | 1785 | ACAAACUCCUGAAAUGCCA | 100 | 1803 | UGGCAUUUCAGGAGUUUGU | 215 |
| 1803 | AAGUGCCUGCUUAGUAGCU | 101 | 1803 | AAGUGCCUGCUUAGUAGCU | 101 | 1821 | AGCUACUAAGCAGGCACUU | 216 |
| 1821 | UUUGGAAAGGUGCCCUUAU | 102 | 1821 | UUUGGAAAGGUGCCCUUAU | 102 | 1839 | AUAAGGGCACCUUUCCAAA | 217 |
| 1839 | UUGAACAUUCUAGAAGGGG | 103 | 1839 | UUGAACAUUCUAGAAGGGG | 103 | 1857 | CCCCUUCUAGAAUGUUCAA | 218 |
| 1857 | GUGGCUGGGUCUUCAAGGA | 104 | 1857 | GUGGCUGGGUCUUCAAGGA | 104 | 1875 | UCCUUGAAGACCCAGCCAC | 219 |
| 1875 | AUCUCCUGUUUUUUUCAGG | 105 | 1875 | AUCUCCUGUUUUUUUCAGG | 105 | 1893 | CCUGAAAAAAACAGGAGAU | 220 |
| 1893 | GCUCCUAAAGUAACAUCAG | 106 | 1893 | GCUCCUAAAGUAACAUCAG | 106 | 1911 | CUGAUGUUACUUUAGGAGC | 221 |
| 1911 | GCCAUUUUUAGAUUGGUUC | 107 | 1911 | GCCAUUUUUAGAUUGGUUC | 107 | 1929 | GAACCAAUCUAAAAAUGGC | 222 |
| 1929 | CUGUUUUCGUACCUUCCCA | 108 | 1929 | CUGUUUUCGUACCUUCCCA | 108 | 1947 | UGGGAAGGUACGAAAACAG | 223 |
| 1947 | ACUGGCCUCAAGUGAGCCA | 109 | 1947 | ACUGGCCUCAAGUGAGCCA | 109 | 1965 | UGGCUCACUUGAGGCCAGU | 224 |
| 1965 | AAGAAACACUGCCUGCCCU | 110 | 1965 | AAGAAACACUGCCUGCCCU | 110 | 1983 | AGGGCAGGCAGUGUUUCUU | 225 |
| 1983 | UCUGUCUGUCUUCUCCUAA | 111 | 1983 | UCUGUCUGUCUUCUCCUAA | 111 | 2001 | UUAGGAGAAGACAGACAGA | 226 |
| 2001 | AUUCUGCAGGUGGAGGUUG | 112 | 2001 | AUUCUGCAGGUGGAGGUUG | 112 | 2019 | CAACCUCCACCUGCAGAAU | 227 |
| 2019 | GCUAGUCUAGUUUCCUUUU | 113 | 2019 | GCUAGUCUAGUUUCCUUUU | 113 | 2037 | AAAAGGAAACUAGACUAGC | 228 |
| 2037 | UUGAGAUACUAUUUUCAUU | 114 | 2037 | UUGAGAUACUAUUUUCAUU | 114 | 2055 | AAUGAAAAUAGUAUCUCAA | 229 |
| 2055 | UUUUGUGAGCCUCUUUGUA | 115 | 2055 | UUUUGUGAGCCUCUUUGUA | 115 | 2073 | UACAAAGAGGCUCACAAAA | 230 |

HDAC2: NM_001527.1

| | | | | | | | | |
|---|---|---|---|---|---|---|---|---|
| 3 | CCGAGCUUUCGGCACCUCU | 343 | 3 | CCGAGCUUUCGGCACCUCU | 343 | 21 | AGAGGUGCCGAAAGCUCGG | 453 |
| 21 | UGCCGGGUGGUACCGAGCC | 344 | 21 | UGCCGGGUGGUACCGAGCC | 344 | 39 | GGCUCGGUACCACCCGGCA | 454 |
| 39 | CUUCCCGGCGCCCCCUCCU | 345 | 39 | CUUCCCGGCGCCCCCUCCU | 345 | 57 | AGGAGGGGGCGCCGGGAAG | 455 |
| 57 | UCUCCUCCCACCGGCCUGC | 346 | 57 | UCUCCUCCCACCGGCCUGC | 346 | 75 | GCAGGCCGGUGGGAGGAGA | 456 |
| 75 | CCCUUCCCCGCGGGACUAU | 347 | 75 | CCCUUCCCCGCGGGACUAU | 347 | 93 | AUAGUCCCGCGGGGAAGGG | 457 |
| 93 | UCGCCCCCACGUUUCCCUC | 348 | 93 | UCGCCCCCACGUUUCCCUC | 348 | 111 | GAGGGAAACGUGGGGGCGA | 458 |
| 111 | CAGCCCUUUUCUCUCCCGG | 349 | 111 | CAGCCCUUUUCUCUCCCGG | 349 | 129 | CCGGGAGAGAAAAGGGCUG | 459 |
| 129 | GCCGAGCCGCGGCGGCAGC | 350 | 129 | GCCGAGCCGCGGCGGCAGC | 350 | 147 | GCUGCCGCCGCGGCUCGGC | 460 |
| 147 | CAGCAGCAGCAGCAGCAGC | 351 | 147 | CAGCAGCAGCAGCAGCAGC | 351 | 165 | GCUGCUGCUGCUGCUGCUG | 461 |
| 165 | CAGGAGGAGGAGCCCGGUG | 352 | 165 | CAGGAGGAGGAGCCCGGUG | 352 | 183 | CACCGGGCUCCUCCUCCUG | 462 |
| 183 | GGCGGCGGUGGCCGGGGAG | 353 | 183 | GGCGGCGGUGGCCGGGGAG | 353 | 201 | CUCCCCGGCCACCGCCGCC | 463 |
| 201 | GGCCAUGGCGUACAGUCAA | 354 | 201 | GCCCAUGGCGUACAGUCAA | 354 | 219 | UUGACUGUACGCCAUGGGC | 464 |
| 219 | AGGAGGCGGCAAAAAAAAA | 355 | 219 | AGGAGGCGGCAAAAAAAAA | 355 | 237 | UUUUUUUUUGCCGCCUCCU | 465 |
| 237 | AGUCUGCUACUACUACGAC | 356 | 237 | AGUCUGCUACUACUACGAC | 356 | 255 | GUCGUAGUAGUAGCAGACU | 466 |
| 255 | CGGUGAUAUUGGAAAUUAU | 357 | 255 | CGGUGAUAUUGGAAAUUAU | 357 | 273 | AUAAUUUCCAAUAUCACCG | 467 |
| 273 | UUAUUAUGGACAGGGUCAU | 358 | 273 | UUAUUAUGGACAGGGUCAU | 358 | 291 | AUGACCCUGUCCAUAAUAA | 468 |
| 291 | UCCCAUGAAGCCUCAUAGA | 359 | 291 | UCCCAUGAAGCCUCAUAGA | 359 | 309 | UCUAUGAGGCUUCAUGGGA | 469 |
| 309 | AAUCCGCAUGACCCAUAAC | 360 | 309 | AAUCCGCAUGACCCAUAAC | 360 | 327 | GUUAUGGGUCAUGCGGAUU | 470 |
| 327 | CUUGCUGUUAAAUUAUGGC | 361 | 327 | CUUGCUGUUAAAUUAUGGC | 361 | 345 | GCCAUAAUUUAACAGCAAG | 471 |
| 345 | CUUAUACAGAAAAAUGGAA | 362 | 345 | CUUAUACAGAAAAAUGGAA | 362 | 363 | UUCCAUUUUUCUGUAUAAG | 472 |
| 363 | AAUAUAUAGGCCCCAUAAA | 363 | 363 | AAUAUAUAGGCCCCAUAAA | 363 | 381 | UUUAUGGGGCCUAUAUAUU | 473 |
| 381 | AGCCACUGCCGAAGAAAUG | 364 | 381 | AGCCACUGCCGAAGAAAUG | 364 | 399 | CAUUUCUUCGGCAGUGGCU | 474 |
| 399 | GACAAAAUAUCACAGUGAU | 365 | 399 | GACAAAAUAUCACAGUGAU | 365 | 417 | AUCACUGUGAUAUUUUGUC | 475 |
| 417 | UGAGUAUAUCAAAUUUCUA | 366 | 417 | UGAGUAUAUCAAAUUUCUA | 366 | 435 | UAGAAAUUUGAUAUACUCA | 476 |
| 435 | ACGGUCAAUAAGACCAGAU | 367 | 435 | ACGGUCAAUAAGACCAGAU | 367 | 453 | AUCUGGUCUUAUUGACCGU | 477 |
| 453 | UAACAUGUCUGAGUAUAGU | 368 | 453 | UAACAUGUCUGAGUAUAGU | 368 | 471 | ACUAUACUCAGACAUGUUA | 478 |
| 471 | UAAGCAGAUGCAUAUAUUU | 369 | 471 | UAAGCAGAUGCAUAUAUUU | 369 | 489 | AAAUAUAUGCAUCUGCUUA | 479 |
| 489 | UAAUGUUGGAGAAGAUUGU | 370 | 489 | UAAUGUUGGAGAAGAUUGU | 370 | 507 | ACAAUCUUCUCCAACAUUA | 480 |
| 507 | UCCAGCGUUUGAUGGACUC | 371 | 507 | UCCAGCGUUUGAUGGACUC | 371 | 525 | GAGUCCAUCAAACGCUGGA | 481 |
| 525 | CUUUGAGUUUUGUCAGCUC | 372 | 525 | CUUUGAGUUUUGUCAGCUC | 372 | 543 | GAGCUGACAAAACUCAAAG | 482 |
| 543 | CUCAACUGGCGGUUCAGUU | 373 | 543 | CUCAACUGGCGGUUCAGUU | 373 | 561 | AACUGAACCGCCAGUUGAG | 483 |
| 561 | UGCUGGAGCUGUGAAGUUA | 374 | 561 | UGCUGGAGCUGUGAAGUUA | 374 | 579 | UAACUUCACAGCUCCAGCA | 484 |
| 579 | AAACCGACAACAGACUGAU | 375 | 579 | AAACCGACAACAGACUGAU | 375 | 597 | AUCAGUCUGUUGUCGGUUU | 485 |
| 597 | UAUGGCUGUUAAUUGGGCU | 376 | 597 | UAUGGCUGUUAAUUGGGCU | 376 | 615 | AGCCCAAUUAACAGCCAUA | 486 |
| 615 | UGGAGGAUUACAUCAUGCU | 377 | 615 | UGGAGGAUUACAUCAUGCU | 377 | 633 | AGCAUGAUGUAAUCCUCCA | 487 |
| 633 | UAAGAAAUACGAAGCAUCA | 378 | 633 | UAAGAAAUACGAAGCAUCA | 378 | 651 | UGAUGCUUCGUAUUUCUUA | 488 |
| 651 | AGGAUUCUGUUACGUUAAU | 379 | 651 | AGGAUUCUGUUACGUUAAU | 379 | 669 | AUUAACGUAACAGAAUCCU | 489 |
| 669 | UGAUAUUGUGCUUGCCAUC | 380 | 669 | UGAUAUUGUGCUUGCCAUC | 380 | 687 | GAUGGCAAGCACAAUAUCA | 490 |
| 687 | CCUUGAAUUACUAAAGUAU | 381 | 687 | CCUUGAAUUACUAAAGUAU | 381 | 705 | AUACUUUAGUAAUUCAAGG | 491 |
| 705 | UCAUCAGAGAGUCUUAUAU | 382 | 705 | UCAUCAGAGAGUCUUAUAU | 382 | 723 | AUAUAAGACUCUCUGAUGA | 492 |
| 723 | UAUUGAUAUAGAUAUUCAU | 383 | 723 | UAUUGAUAUAGAUAUUCAU | 383 | 741 | AUGAAUAUCUAUAUCAAUA | 493 |
| 741 | UCAUGGUGAUGGUGUUGAA | 384 | 741 | UCAUGGUGAUGGUGUUGAA | 384 | 759 | UUCAACACCAUCACCAUGA | 494 |
| 759 | AGAAGCUUUUUAUACAACA | 385 | 759 | AGAAGCUUUUUAUACAACA | 385 | 777 | UGUUGUAUAAAAAGCUUCU | 495 |
| 777 | AGAUCGUGUAAUGACGGUA | 386 | 777 | AGAUCGUGUAAUGACGGUA | 386 | 795 | UACCGUCAUUACACGAUCU | 496 |
| 795 | AUCAUUCCAUAAAUAUGGG | 387 | 795 | AUCAUUCCAUAAAUAUGGG | 387 | 813 | CCCAUAUUUAUGGAAUGAU | 497 |
| 813 | GGAAUACUUUCCUGGCAGA | 388 | 813 | GGAAUACUUUCCUGGCACA | 388 | 831 | UGUGCCAGGAAAGUAUUCC | 498 |
| 831 | AGGAGACUUGAGGGAUAUU | 389 | 831 | AGGAGACUUGAGGGAUAUU | 389 | 849 | AAUAUCCCUCAAGUCUCCU | 499 |
| 849 | UGGUGCUGGAAAAGGCAAA | 390 | 849 | UGGUGCUGGAAAAGGCAAA | 390 | 867 | UUUGCCUUUUCCAGCACCA | 500 |
| 867 | AUACUAUGCUGUCAAUUUU | 391 | 867 | AUACUAUGCUGUCAAUUUU | 391 | 885 | AAAAUUGACAGCAUAGUAU | 501 |
| 885 | UCCAAUGUGUGAUGGUAUA | 392 | 885 | UCCAAUGUGUGAUGGUAUA | 392 | 903 | UAUACCAUCACACAUUGGA | 502 |
| 903 | AGAUGAUGAGUCAUAUGGG | 393 | 903 | AGAUGAUGAGUCAUAUGGG | 393 | 921 | CCCAUAUGACUCAUCAUCU | 503 |
| 921 | GCAGAUAUUUAAGCCUAUU | 394 | 921 | GCAGAUAUUUAAGCCUAUU | 394 | 939 | AAUAGGCUUAAAUAUCUGC | 504 |
| 939 | UAUCUCAAAGGUGAUGGAG | 395 | 939 | UAUCUCAAAGGUGAUGGAG | 395 | 957 | CUCCAUCACCUUUGAGAUA | 505 |
| 957 | GAUGUAUCAACCUAGUGCU | 396 | 957 | GAUGUAUCAACCUAGUGCU | 396 | 975 | AGCACUAGGUUGAUACAUC | 506 |
| 975 | UGUGGUAUUACAGUGUGGU | 397 | 975 | UGUGGUAUUACAGUGUGGU | 397 | 993 | ACCACACUGUAAUACCACA | 507 |
| 993 | UGCAGACUCAUUAUCUGGU | 398 | 993 | UGCAGACUCAUUAUCUGGU | 398 | 1011 | ACCAGAUAAUGAGUCUGCA | 508 |
| 1011 | UGAUAGACUGGGUUGUUUC | 399 | 1011 | UGAUAGACUGGGUUGUUUC | 399 | 1029 | GAAACAACCCAGUCUAUCA | 509 |
| 1029 | CAAUCUAACAGUCAAAGGU | 400 | 1029 | CAAUCUAACAGUCAAAGGU | 400 | 1047 | ACCUUUGACUGUUAGAUUG | 510 |
| 1047 | UCAUGCUAAAUGUGUAGAA | 401 | 1047 | UCAUGCUAAAUGUGUAGAA | 401 | 1065 | UUCUACACAUUUAGCAUGA | 511 |
| 1065 | AGUUGUAAAAACUUUUAAC | 402 | 1065 | AGUUGUAAAAACUUUUAAC | 402 | 1083 | GUUAAAAGUUUUUACAACU | 512 |
| 1083 | CUUACCAUUACUGAUGCUU | 403 | 1083 | CUUACCAUUACUGAUGCUU | 403 | 1101 | AAGCAUCAGUAAUGGUAAG | 513 |
| 1101 | UGGAGGAGGUGGCUACACA | 404 | 1101 | UGGAGGAGGUGGCUACACA | 404 | 1119 | UGUGUAGCCACCUCCUCCA | 514 |
| 1119 | AAUCCGUAAUGUUGCUCGA | 405 | 1119 | AAUCCGUAAUGUUGCUCGA | 405 | 1137 | UCGAGCAACAUUACGGAUU | 515 |
| 1137 | AUGUUGGACAUAUGAGACU | 406 | 1137 | AUGUUGGACAUAUGAGACU | 406 | 1155 | AGUCUCAUAUGUCCAACAU | 516 |
| 1155 | UGCAGUUGCCCUUGAUUGU | 407 | 1155 | UGCAGUUGCCCUUGAUUGU | 407 | 1173 | ACAAUCAAGGGCAACUGCA | 517 |
| 1173 | UGAGAUUCCCAAUGAGUUG | 408 | 1173 | UGAGAUUCCCAAUGAGUUG | 408 | 1191 | CAACUCAUUGGGAAUCUCA | 518 |
| 1191 | GCCAUAUAAUGAUUACUUU | 409 | 1191 | GCCAUAUAAUGAUUACUUU | 409 | 1209 | AAAGUAAUCAUUAUAUGGC | 519 |
| 1209 | UGAGUAUUUUGGACCAGAC | 410 | 1209 | UGAGUAUUUUGGACCAGAC | 410 | 1227 | GUCUGGUCCAAAAUACUCA | 520 |
| 1227 | CUUCAAACUGCAUAUUAGU | 411 | 1227 | CUUCAAACUGCAUAUUAGU | 411 | 1245 | ACUAAUAUGCAGUUUGAAG | 521 |
| 1245 | UCCUUCAAACAUGACAAAC | 412 | 1245 | UCCUUCAAACAUGACAAAC | 412 | 1263 | GUUUGUCAUGUUUGAAGGA | 522 |
| 1263 | CCAGAACACUCCAGAAUAU | 413 | 1263 | CCAGAACACUCCAGAAUAU | 413 | 1281 | AUAUUCUGGAGUGUUCUGG | 523 |
| 1281 | UAUGGAAAAGAUAAAACAG | 414 | 1281 | UAUGGAAAAGAUAAAACAG | 414 | 1299 | CUGUUUUAUCUUUUCCAUA | 524 |
| 1299 | GCGUUUGUUUGAAAAUUUG | 415 | 1299 | GCGUUUGUUUGAAAAUUUG | 415 | 1317 | CAAAUUUUCAAACAAACGC | 525 |
| 1317 | GCGCAUGUUACCUCAUGCA | 416 | 1317 | GCGCAUGUUACCUCAUGCA | 416 | 1335 | UGCAUGAGGUAACAUGCGC | 526 |
| 1335 | ACCUGGUGUCCAGAUGCAA | 417 | 1335 | ACCUGGUGUCCAGAUGCAA | 417 | 1353 | UUGCAUCUGGACACCAGGU | 527 |
| 1353 | AGCUAUUCCAGAAGAUGCU | 418 | 1353 | AGCUAUUCCAGAAGAUGCU | 418 | 1371 | AGCAUCUUCUGGAAUAGCU | 528 |
| 1371 | UGUUCAUGAAGACAGUGGA | 419 | 1371 | UGUUCAUGAAGACAGUGGA | 419 | 1389 | UCCACUGUCUUCAUGAACA | 529 |
| 1389 | AGAUGAAGAUGGAGAAGAU | 420 | 1389 | AGAUGAAGAUGGAGAAGAU | 420 | 1407 | AUCUUCUCCAUCUUCAUCU | 530 |
| 1407 | UCCAGACAAGAGAAUUUCU | 421 | 1407 | UCCAGACAAGAGAAUUUCU | 421 | 1425 | AGAAAUUCUCUUGUCUGGA | 531 |
| 1425 | UAUUCGAGCAUCAGACAAG | 422 | 1425 | UAUUCGAGCAUCAGACAAG | 422 | 1443 | CUUGUCUGAUGCUCGAAUA | 532 |
| 1443 | GCGGAUAGCUUGUGAUGAA | 423 | 1443 | GCGGAUAGCUUGUGAUGAA | 423 | 1461 | UUCAUCACAAGCUAUCCGC | 533 |
| 1461 | AGAAUUCUCAGAUUCUGAG | 424 | 1461 | AGAAUUCUCAGAUUCUGAG | 424 | 1479 | CUCAGAAUCUGAGAAUUCU | 534 |
| 1479 | GGAUGAAGGAGAAGGAGGU | 425 | 1479 | GGAUGAAGGAGAAGGAGGU | 425 | 1497 | ACCUCCUUCUCCUUCAUCC | 535 |
| 1497 | UCGAAGAAAUGUGGCUGAU | 426 | 1497 | UCGAAGAAAUGUGGCUGAU | 426 | 1515 | AUCAGCCACAUUUCUUCGA | 536 |
| 1515 | UCAUAAGAAAGGAGCAAAG | 427 | 1515 | UCAUAAGAAAGGAGCAAAG | 427 | 1533 | CUUUGCUCCUUUCUUAUGA | 537 |
| 1533 | GAAAGCUAGAAUUGAAGAA | 428 | 1533 | GAAAGCUAGAAUUGAAGAA | 428 | 1551 | UUCUUCAAUUCUAGCUUUC | 538 |
| 1551 | AGAUAAGAAAGAAACAGAG | 429 | 1551 | AGAUAAGAAAGAAACAGAG | 429 | 1569 | CUCUGUUUCUUUCUUAUCU | 539 |
| 1569 | GGACAAAAAAACAGACGUU | 430 | 1569 | GGACAAAAAAACAGACGUU | 430 | 1587 | AACGUCUGUUUUUUUGUCC | 540 |
| 1587 | UAAGGAAGAAGAUAAAUCC | 431 | 1587 | UAAGGAAGAAGAUAAAUCC | 431 | 1605 | GGAUUUAUCUUCUUCCUUA | 541 |
| 1605 | CAAGGACAACAGUGGUGAA | 432 | 1605 | CAAGGACAACAGUGGUGAA | 432 | 1623 | UUCACCACUGUUGUCCUUG | 542 |
| 1623 | AAAAACAGAUACCAAAGGA | 433 | 1623 | AAAAACAGAUACCAAAGGA | 433 | 1641 | UCCUUUGGUAUCUGUUUUU | 543 |
| 1641 | AACCAAAUCAGAACAGCUC | 434 | 1641 | AACCAAAUCAGAACAGCUC | 434 | 1659 | GAGCUGUUCUGAUUUGGUU | 544 |
| 1659 | CAGCAACCCCUGAAUUUGA | 435 | 1659 | CAGCAACCCCUGAAUUUGA | 435 | 1677 | UCAAAUUCAGGGGUUGCUG | 545 |
| 1677 | ACAGUCUCACCAAUUUCAG | 436 | 1677 | ACAGUCUCACCAAUUUCAG | 436 | 1695 | CUGAAAUUGGUGAGACUGU | 546 |
| 1695 | GAAAAUCAUUAAAAAGAAA | 437 | 1695 | GAAAAUCAUUAAAAAGAAA | 437 | 1713 | UUUCUUUUUAAUGAUUUUC | 547 |
| 1713 | AAUAUUGAAAGGAAAAUGU | 438 | 1713 | AAUAUUGAAAGGAAAAUGU | 438 | 1731 | ACAUUUUCCUUUCAAUAUU | 548 |
| 1731 | UUUUCUUUUUGAAGACUUC | 439 | 1731 | UUUUCUUUUUGAAGACUUC | 439 | 1749 | GAAGUCUUCAAAAAGAAAA | 549 |
| 1749 | CUGGCUUCAUUUUAUACUA | 440 | 1749 | CUGGCUUCAUUUUAUACUA | 440 | 1767 | UAGUAUAAAAUGAAGCCAG | 550 |
| 1767 | ACUUUGGCAUGGACUGUAU | 441 | 1767 | ACUUUGGCAUGGACUGUAU | 441 | 1785 | AUACAGUCCAUGCCAAAGU | 551 |
| 1785 | UUUAUUUUCAAAUGGGACU | 442 | 1785 | UUUAUUUUCAAAUGGGACU | 442 | 1803 | AGUCCCAUUUGAAAAUAAA | 552 |
| 1803 | UUUUUCGUUUUUGUUUUUC | 443 | 1803 | UUUUUCGUUUUUGUUUUUC | 443 | 1821 | GAAAAACAAAAACGAAAAA | 553 |
| 1821 | CUGGGCAAGUUUUAUUGUG | 444 | 1821 | CUGGGCAAGUUUUAUUGUG | 444 | 1839 | CACAAUAAAACUUGCCCAG | 554 |
| 1839 | GAGAUUUUCUAAUUAUGAA | 445 | 1839 | GAGAUUUUCUAAUUAUGAA | 445 | 1857 | UUCAUAAUUAGAAAAUCUC | 555 |
| 1857 | AGCAAAAUUUCUUUUCUCC | 446 | 1857 | AGCAAAAUUUCUUUUCUCC | 446 | 1875 | GGAGAAAAGAAAUUUUGCU | 556 |
| 1875 | CACCAUGCUUUAUGUGAUA | 447 | 1875 | CACCAUGCUUUAUGUGAUA | 447 | 1893 | UAUCACAUAAAGCAUGGUG | 557 |
| 1893 | AGUAUUUAAAAUUGAUGUG | 448 | 1893 | AGUAUUUAAAAUUGAUGUG | 448 | 1911 | CACAUCAAUUUUAAAUACU | 558 |
| 1911 | GAGUUAUUAUGUCAAAAAA | 449 | 1911 | GAGUUAUUAUGUCAAAAAA | 449 | 1929 | UUUUUUGACAUAAUAACUC | 559 |
| 1929 | AACUGAUCUAUUAAAGAAG | 450 | 1929 | AACUGAUCUAUUAAAGAAG | 450 | 1947 | CUUCUUUAAUAGAUCAGUU | 560 |
| 1947 | GUAAUUGGCCUUUCUGAGC | 451 | 1947 | GUAAUUGGCCUUUCUGAGC | 451 | 1965 | GCUCAGAAAGGCCAAUUAC | 561 |
| 1965 | CUGAAAAAAAAAAAAAAAA | 452 | 1965 | CUGAAAAAAAAAAAAAAAA | 452 | 1983 | UUUUUUUUUUUUUUUUCAG | 562 |

HDAC3: NM_003883.2

| | | | | | | | | |
|---|---|---|---|---|---|---|---|---|
| 3 | GGCGGCCGCGGGCGGCGGG | 675 | 3 | GGCGGCCGCGGGCGGCGGG | 675 | 21 | CCCGCCGCCCGCGGCCGCC | 783 |
| 21 | GCGGCGGAGGUGCGGGGCC | 676 | 21 | GCGGCGGAGGUGCGGGGCC | 676 | 39 | GGCCCCGCACCUCCGCCGC | 784 |
| 39 | CUGCUCCCGCCGGCACCAU | 677 | 39 | CUGCUCCCGCCGGCACCAU | 677 | 57 | AUGGUGCCGGCGGGAGCAG | 785 |
| 57 | UGGCCAAGACCGUGGCCUA | 678 | 57 | UGGCCAAGACCGUGGCCUA | 678 | 75 | UAGGCCACGGUCUUGGCCA | 786 |
| 75 | AUUUCUACGACCCCGACGU | 679 | 75 | AUUUCUACGACCCCGACGU | 679 | 93 | ACGUCGGGGUCGUAGAAAU | 787 |
| 93 | UGGGCAACUUCCACUACGG | 680 | 93 | UGGGCAACUUCCACUACGG | 680 | 111 | CCGUAGUGGAAGUUGCCCA | 788 |
| 111 | GAGCUGGACACCCUAUGAA | 681 | 111 | GAGCUGGACACCCUAUGAA | 681 | 129 | UUCAUAGGGUGUCCAGCUC | 789 |
| 129 | AGCCCCAUCGCCUGGCAUU | 682 | 129 | AGCCCCAUCGCCUGGCAUU | 682 | 147 | AAUGCCAGGCGAUGGGGCU | 790 |
| 147 | UGACCCAUAGCCUGGUCCU | 683 | 147 | UGACCCAUAGCCUGGUCCU | 683 | 165 | AGGACCAGGCUAUGGGUCA | 791 |
| 165 | UGCAUUACGGUCUCUAUAA | 684 | 165 | UGCAUUACGGUCUCUAUAA | 684 | 183 | UUAUAGAGACCGUAAUGCA | 792 |
| 183 | AGAAGAUGAUCGUCUUCAA | 685 | 183 | AGAAGAUGAUCGUCUUCAA | 685 | 201 | UUGAAGACGAUCAUCUUCU | 793 |
| 201 | AGCCAUACCAGGCCUCCCA | 686 | 201 | AGCCAUACCAGGCCUCCCA | 686 | 219 | UGGGAGGCCUGGUAUGGCU | 794 |
| 219 | AGCAUGACAUGUGCCGCUU | 687 | 219 | AGCAUGACAUGUGCCGCUU | 687 | 237 | AAGCGGCACAUGUCAUGCU | 795 |
| 237 | UCCACUCCGAGGACUACAU | 688 | 237 | UCCACUCCGAGGACUACAU | 688 | 255 | AUGUAGUCCUCGGAGUGGA | 796 |
| 255 | UUGACUUCCUGCAGAGAGU | 689 | 255 | UUGACUUCCUGCAGAGAGU | 689 | 273 | ACUCUCUGCAGGAAGUCAA | 797 |
| 273 | UCAGCCCCACCAAUAUGCA | 690 | 273 | UCAGCCCCACCAAUAUGCA | 690 | 291 | UGCAUAUUGGUGGGGCUGA | 798 |
| 291 | AAGGCUUCACCAAGAGUCU | 691 | 291 | AAGGCUUCACCAAGAGUCU | 691 | 309 | AGACUCUUGGUGAAGCCUU | 799 |
| 309 | UUAAUGCCUUCAACGUAGG | 692 | 309 | UUAAUGCCUUCAACGUAGG | 692 | 327 | CCUACGUUGAAGGCAUUAA | 800 |
| 327 | GCGAUGACUGCCCAGUGUU | 693 | 327 | GCGAUGACUGCCCAGUGUU | 693 | 345 | AACACUGGGCAGUCAUCGC | 801 |
| 345 | UUCCCGGGCUCUUUGAGUU | 694 | 345 | UUCCCGGGCUCUUUGAGUU | 694 | 363 | AACUCAAAGAGCCCGGGAA | 802 |
| 363 | UCUGCUCGCGUUACACAGG | 695 | 363 | UCUGCUCGCGUUACACAGG | 695 | 381 | CCUGUGUAACGCGAGCAGA | 803 |
| 381 | GCGCAUCUCUGCAAGGAGC | 696 | 381 | GCGCAUCUCUGCAAGGAGC | 696 | 399 | GCUCCUUGCAGAGAUGCGC | 804 |
| 399 | CAACCCAGCUGAACAACAA | 697 | 399 | CAACCCAGCUGAACAACAA | 697 | 417 | UUGUUGUUCAGCUGGGUUG | 805 |
| 417 | AGAUCUGUGAUAUUGCCAU | 698 | 417 | AGAUCUGUGAUAUUGCCAU | 698 | 435 | AUGGCAAUAUCACAGAUCU | 806 |
| 435 | UUAACUGGGCUGGUGGUCU | 699 | 435 | UUAACUGGGCUGGUGGUCU | 699 | 453 | AGACCACCAGCCCAGUUAA | 807 |
| 453 | UGCACCAUGCCAAGAAGUU | 700 | 453 | UGCACCAUGCCAAGAAGUU | 700 | 471 | AACUUCUUGGCAUGGUGCA | 808 |
| 471 | UUGAGGCCUCUGGCUUCUG | 701 | 471 | UUGAGGCCUCUGGCUUCUG | 701 | 489 | CAGAAGCCAGAGGCCUCAA | 809 |
| 489 | GCUAUGUCAACGACAUUGU | 702 | 489 | GCUAUGUCAACGACAUUGU | 702 | 507 | ACAAUGUCGUUGACAUAGC | 810 |
| 507 | UGAUUGGCAUCCUGGAGCU | 703 | 507 | UGAUUGGCAUCCUGGAGCU | 703 | 525 | AGCUCCAGGAUGCCAAUCA | 811 |
| 525 | UGCUCAAGUACCACCCUCG | 704 | 525 | UGCUCAAGUACCACCCUCG | 704 | 543 | CGAGGGUGGUACUUGAGCA | 812 |
| 543 | GGGUGCUCUACAUUGACAU | 705 | 543 | GGGUGCUCUACAUUGACAU | 705 | 561 | AUGUCAAUGUAGAGCACCC | 813 |
| 561 | UUGACAUCGACCAUGGUGA | 706 | 561 | UUGACAUCCACCAUGGUGA | 706 | 579 | UCACCAUGGUGGAUGUCAA | 814 |
| 579 | ACGGGGUUCAAGAAGCUUU | 707 | 579 | ACGGGGUUCAAGAAGCUUU | 707 | 597 | AAAGCUUCUUGAACCCCGU | 815 |
| 597 | UCUACCUCACUGACCGGGU | 708 | 597 | UCUACCUCACUGACCGGGU | 708 | 615 | ACCCGGUCAGUGAGGUAGA | 816 |
| 615 | UCAUGACGGUGUCCUUCCA | 709 | 615 | UCAUGACGGUGUCCUUCCA | 709 | 633 | UGGAAGGACACCGUCAUGA | 817 |
| 633 | ACAAAUACGGAAAUUACUU | 710 | 633 | ACAAAUACGGAAAUUACUU | 710 | 651 | AAGUAAUUUCCGUAUUUGU | 818 |
| 651 | UCUUCCCUGGCACAGGUGA | 711 | 651 | UCUUCCCUGGCACAGGUGA | 711 | 669 | UCACCUGUGCCAGGGAAGA | 819 |
| 669 | ACAUGUAUGAAGUCGGGGC | 712 | 669 | ACAUGUAUGAAGUCGGGGC | 712 | 687 | GCCCCGACUUCAUACAUGU | 820 |
| 687 | CAGAGAGUGGCCGCUACUA | 713 | 687 | CAGAGAGUGGCCGCUACUA | 713 | 705 | UAGUAGCGGCCACUCUCUG | 821 |
| 705 | ACUGUCUGAACGUGCCCCU | 714 | 705 | ACUGUCUGAACGUGCCCCU | 714 | 723 | AGGGGCACGUUCAGACAGU | 822 |
| 723 | UGCGGGAUGGCAUUGAUGA | 715 | 723 | UGCGGGAUGGCAUUGAUGA | 715 | 741 | UCAUCAAUGCCAUCCCGCA | 823 |
| 741 | ACCAGAGUUACAAGCACCU | 716 | 741 | ACCAGAGUUACAAGCACCU | 716 | 759 | AGGUGCUUGUAACUCUGGU | 824 |
| 759 | UUUUCCAGCCGGUUAUCAA | 717 | 759 | UUUUCCAGCCGGUUAUCAA | 717 | 777 | UUGAUAACCGGCUGGAAAA | 825 |
| 777 | ACCAGGUAGUGGACUUCUA | 718 | 777 | ACCAGGUAGUGGACUUCUA | 718 | 795 | UAGAAGUCCACUACCUGGU | 826 |
| 795 | ACCAACCCACGUGCAUUGU | 719 | 795 | ACCAACCCACGUGCAUUGU | 719 | 813 | ACAAUGCACGUGGGUUGGU | 827 |
| 813 | UGCUCCAGUGUGGAGCUGA | 720 | 813 | UGCUCCAGUGUGGAGCUGA | 720 | 831 | UCAGCUCCACACUGGAGCA | 828 |
| 831 | ACUCUCUGGGCUGUGAUCG | 721 | 831 | ACUCUCUGGGCUGUGAUCG | 721 | 849 | CGAUCACAGCCCAGAGAGU | 829 |
| 849 | GAUUGGGCUGCUUUAACCU | 722 | 849 | GAUUGGGCUGCUUUAACCU | 722 | 867 | AGGUUAAAGCAGCCCAAUC | 830 |
| 867 | UCAGCAUCCGAGGGCAUGG | 723 | 867 | UCAGCAUCCGAGGGCAUGG | 723 | 885 | CCAUGCCCUCGGAUGCUGA | 831 |
| 885 | GGGAAUGCGUUGAAUAUGU | 724 | 885 | GGGAAUGCGUUGAAUAUGU | 724 | 903 | ACAUAUUCAACGCAUUCCC | 832 |
| 903 | UCAAGAGCUUCAAUAUCCC | 725 | 903 | UCAAGAGCUUCAAUAUCCC | 725 | 921 | GGGAUAUUGAAGCUCUUGA | 833 |
| 921 | CUCUACUCGUGCUGGGUGG | 726 | 921 | CUCUACUCGUGCUGGGUGG | 726 | 939 | CCACCCAGCACGAGUAGAG | 834 |
| 939 | GUGGUGGUUAUACUGUCCG | 727 | 939 | GUGGUGGUUAUACUGUCCG | 727 | 957 | CGGACAGUAUAACCACCAC | 835 |
| 957 | GAAAUGUUGCCCGCUGCUG | 728 | 957 | GAAAUGUUGCCCGCUGCUG | 728 | 975 | CAGCAGCGGGCAACAUUUC | 836 |
| 975 | GGACAUAUGAGACAUCGCU | 729 | 975 | GGACAUAUGAGACAUCGCU | 729 | 993 | AGCGAUGUCUCAUAUGUCC | 837 |
| 993 | UGCUGGUAGAAGAGGCCAU | 730 | 993 | UGCUGGUAGAAGAGGCCAU | 730 | 1011 | AUGGCCUCUUCUACCAGCA | 838 |
| 1011 | UUAGUGAGGAGCUUCCCUA | 731 | 1011 | UUAGUGAGGAGCUUCCCUA | 731 | 1029 | UAGGGAAGCUCCUCACUAA | 839 |
| 1029 | AUAGUGAAUACUUCGAGUA | 732 | 1029 | AUAGUGAAUACUUCGAGUA | 732 | 1047 | UACUCGAAGUAUUCACUAU | 840 |
| 1047 | ACUUUGCCCCAGACUUCAC | 733 | 1047 | ACUUUGCCCCAGACUUCAC | 733 | 1065 | GUGAAGUCUGGGGCAAAGU | 841 |
| 1065 | CACUUCAUCCAGAUGUCAG | 734 | 1065 | CACUUCAUCCAGAUGUCAG | 734 | 1083 | CUGACAUCUGGAUGAAGUG | 842 |
| 1083 | GCACCCGCAUCGAGAAUCA | 735 | 1083 | GCACCCGCAUCGAGAAUCA | 735 | 1101 | UGAUUCUCGAUGCGGGUGC | 843 |
| 1101 | AGAACUCACGCCAGUAUCU | 736 | 1101 | AGAACUCACGCCAGUAUCU | 736 | 1119 | AGAUACUGGCGUGAGUUCU | 844 |
| 1119 | UGGACCAGAUCCGCCAGAC | 737 | 1119 | UGGACCAGAUCCGCCAGAC | 737 | 1137 | GUCUGGCGGAUCUGGUCCA | 845 |
| 1137 | CAAUCUUUGAAAACCUGAA | 738 | 1137 | CAAUCUUUGAAAACCUGAA | 738 | 1155 | UUCAGGUUUUCAAAGAUUG | 846 |
| 1155 | AGAUGCUGAACCAUGCACC | 739 | 1155 | AGAUGCUGAACCAUGCACC | 739 | 1173 | GGUGCAUGGUUCAGCAUCU | 847 |
| 1173 | CUAGUGUCCAGAUUCAUGA | 740 | 1173 | CUAGUGUCCAGAUUCAUGA | 740 | 1191 | UCAUGAAUCUGGACACUAG | 848 |
| 1191 | ACGUGCCUGCAGACCUCCU | 741 | 1191 | ACGUGCCUGCAGACCUCCU | 741 | 1209 | AGGAGGUCUGCAGGCACGU | 849 |
| 1209 | UGACCUAUGACAGGACUGA | 742 | 1209 | UGACCUAUGACAGGACUGA | 742 | 1227 | UCAGUCCUGUCAUAGGUCA | 850 |
| 1227 | AUGAGGCUGAUGCAGAGGA | 743 | 1227 | AUGAGGCUGAUGCAGAGGA | 743 | 1245 | UCCUCUGCAUCAGCCUCAU | 851 |
| 1245 | AGAGGGGUCCUGAGGAGAA | 744 | 1245 | AGAGGGGUCCUGAGGAGAA | 744 | 1263 | UUCUCCUCAGGACCCCUCU | 852 |
| 1263 | ACUAUAGCAGGCCAGAGGC | 745 | 1263 | ACUAUAGCAGGCCAGAGGC | 745 | 1281 | GCCUCUGGCCUGCUAUAGU | 853 |
| 1281 | CACCCAAUGAGUUCUAUGA | 746 | 1281 | CACCCAAUGAGUUCUAUGA | 746 | 1299 | UCAUAGAACUCAUUGGGUG | 854 |
| 1299 | AUGGAGACCAUGACAAUGA | 747 | 1299 | AUGGAGACCAUGACAAUGA | 747 | 1317 | UCAUUGUCAUGGUCUCCAU | 855 |
| 1317 | ACAAGGAAAGCGAUGUGGA | 748 | 1317 | ACAAGGAAAGCGAUGUGGA | 748 | 1335 | UCCACAUCGCUUUCCUUGU | 856 |
| 1335 | AGAUUUAAGAGUGGCUUGG | 749 | 1335 | AGAUUUAAGAGUGGCUUGG | 749 | 1353 | CCAAGCCACUCUUAAAUCU | 857 |
| 1353 | GGAUGCUGUGUCCCAAGGA | 750 | 1353 | GGAUGCUGUGUCCCAAGGA | 750 | 1371 | UCCUUGGGACACAGCAUCC | 858 |
| 1371 | AAUUUCUUUUCACCUCUUG | 751 | 1371 | AAUUUCUUUUCACCUCUUG | 751 | 1389 | CAAGAGGUGAAAAGAAAUU | 859 |
| 1389 | GGUUGGGCUGGAGGGAAAA | 752 | 1389 | GGUUGGGCUGGAGGGAAAA | 752 | 1407 | UUUUCCCUCCAGCCCAACC | 860 |
| 1407 | AGGAGUGGCUCCUAGAGUC | 753 | 1407 | AGGAGUGGCUCCUAGAGUC | 753 | 1425 | GACUCUAGGAGCCACUCCU | 861 |
| 1425 | CCUGGGGGUCACCCCAGGG | 754 | 1425 | CCUGGGGGUCACCCCAGGG | 754 | 1443 | CCCUGGGGUGACCCCCAGG | 862 |
| 1443 | GCUUUUGCUGACUCUGGGA | 755 | 1443 | GCUUUUGCUGACUCUGGGA | 755 | 1461 | UCCCAGAGUCAGCAAAAGC | 863 |
| 1461 | AAAGAGUCUGGAGACCACA | 756 | 1461 | AAAGAGUCUGGAGACCACA | 756 | 1479 | UGUGGUCUCCAGACUCUUU | 864 |
| 1479 | AUUUGGUUCUCGAACCAUC | 757 | 1479 | AUUUGGUUCUCGAACCAUC | 757 | 1497 | GAUGGUUCGAGAACCAAAU | 865 |
| 1497 | CUACCUGCUUUUCCUCUCU | 758 | 1497 | CUACCUGCUUUUCCUCUCU | 758 | 1515 | AGAGAGGAAAAGCAGGUAG | 866 |
| 1515 | UCUCCCAAGGCCUGACAAU | 759 | 1515 | UCUCCCAAGGCCUGACAAU | 759 | 1533 | AUUGUCAGGCCUUGGGAGA | 867 |
| 1533 | UGGUACCUAUUAGGGAUGG | 760 | 1533 | UGGUACCUAUUAGGGAUGG | 760 | 1551 | CCAUCCCUAAUAGGUACCA | 868 |
| 1551 | GAGAUACAGACAAGGAUAG | 761 | 1551 | GAGAUACAGACAAGGAUAG | 761 | 1569 | CUAUCCUUGUCUGUAUCUC | 869 |
| 1569 | GCUAUCUGGGACAUUAUUG | 762 | 1569 | GCUAUCUGGGACAUUAUUG | 762 | 1587 | CAAUAAUGUCCCAGAUAGC | 870 |
| 1587 | GGCAGUGGGCCCUGGAGGC | 763 | 1587 | GGCAGUGGGCCCUGGAGGC | 763 | 1605 | GCCUCCAGGGCCCACUGCC | 871 |
| 1605 | CCAGUCCCUAGCCCCCCUU | 764 | 1605 | CCAGUCCCUAGCCCCCCUU | 764 | 1623 | AAGGGGGGCUAGGGACUGG | 872 |
| 1623 | UGCCCCUUAUUUCUUCCCU | 765 | 1623 | UGCCCCUUAUUUCUUCCCU | 765 | 1641 | AGGGAAGAAAUAAGGGGCA | 873 |
| 1641 | UGCUUCCCUCGAACCCAGA | 766 | 1641 | UGCUUCCCUCGAACCCAGA | 766 | 1659 | UCUGGGUUCGAGGGAAGCA | 874 |
| 1659 | AGAUUUUUGAGGGAUGAAC | 767 | 1659 | AGAUUUUUGAGGGAUGAAC | 767 | 1677 | GUUCAUCCCUCAAAAAUCU | 875 |
| 1677 | CGGGUAGACAAGGACUGAG | 768 | 1677 | CGGGUAGACAAGGACUGAG | 768 | 1695 | CUCAGUCCUUGUCUACCCG | 876 |
| 1695 | GAUUGCCUCUGACUUCCUC | 769 | 1695 | GAUUGCCUCUGACUUCCUC | 769 | 1713 | GAGGAAGUCAGAGGCAAUC | 877 |
| 1713 | CCUCCCCUGGGUUCUGACU | 770 | 1713 | CCUCCCCUGGGUUCUGACU | 770 | 1731 | AGUCAGAACCCAGGGGAGG | 878 |
| 1731 | UUCUUCCUCCCCUUGCUUC | 771 | 1731 | UUCUUCCUCCCCUUGCUUC | 771 | 1749 | GAAGCAAGGGGAGGAAGAA | 879 |
| 1749 | CCAGGGAAGAUGAAGAGAG | 772 | 1749 | CCAGGGAAGAUGAAGAGAG | 772 | 1767 | CUCUCUUCAUCUUCCCUGG | 880 |
| 1767 | GAGAGAUUUGGAAGGGGCU | 773 | 1767 | GAGAGAUUUGGAAGGGGCU | 773 | 1785 | AGCCCCUUCCAAAUCUCUC | 881 |
| 1785 | UCUGGCUCCCUAACACCUG | 774 | 1785 | UCUGGCUCCCUAACACCUG | 774 | 1803 | CAGGUGUUAGGGAGCCAGA | 882 |
| 1803 | GAAUCCCAGAUGAUGGGAA | 775 | 1803 | GAAUCCCAGAUGAUGGGAA | 775 | 1821 | UUCCCAUCAUCUGGGAUUC | 883 |
| 1821 | AGUAUGUUUUCAAGUGUGG | 776 | 1821 | AGUAUGUUUUCAAGUGUGG | 776 | 1839 | CCACACUUGAAAACAUACU | 884 |
| 1839 | GGGAGGAUAUGAAAAUGUU | 777 | 1839 | GGGAGGAUAUGAAAAUGUU | 777 | 1857 | AACAUUUUCAUAUCCUCCC | 885 |
| 1857 | UCUGUUCUCACUUUUGGCU | 778 | 1857 | UCUGUUCUCACUUUUGGCU | 778 | 1875 | AGCCAAAAGUGAGAACAGA | 886 |
| 1875 | UUUAUGUCCAUUUUACCAC | 779 | 1875 | UUUAUGUCCAUUUUACCAC | 779 | 1893 | GUGGUAAAAUGGACAUAAA | 887 |
| 1893 | CUGUUUUUAUCCAAUAAAC | 780 | 1893 | CUGUUUUUAUCCAAUAAAC | 780 | 1911 | GUUUAUUGGAUAAAAACAG | 888 |
| 1911 | CUAAGUCGGUAUUUUUUGU | 781 | 1911 | CUAAGUCGGUAUUUUUUGU | 781 | 1929 | ACAAAAAAUACCGACUUAG | 889 |
| 1929 | UACCUUUAAAAAAAAAAAA | 782 | 1929 | UACCUUUAAAAAAAAAAAA | 782 | 1947 | UUUUUUUUUUUUAAAGGUA | 890 |

HDAC4: NM_006037.2

| | | | | | | | | |
|---|---|---|---|---|---|---|---|---|
| 3 | AGGUUGUGGGGCCGCCGCC | 1003 | 3 | AGGUUGUGGGGCCGCCGCC | 1003 | 21 | GGCGGCGGCCCCACAACCU | 1472 |
| 21 | CGCGGAGCACCGUCCCCGC | 1004 | 21 | CGCGGAGCACCGUCCCCGC | 1004 | 39 | GCGGGGACGGUGCUCCGCG | 1473 |
| 39 | CCGCCGCCCGAGCCCGAGC | 1005 | 39 | CCGCCGCCCGAGCCCGAGC | 1005 | 57 | GCUCGGGCUCGGGCGGCGG | 1474 |
| 57 | CCCGAGCCCGCGCACCCGC | 1006 | 57 | CCCGAGCCCGCGCACCCGC | 1006 | 75 | GCGGGUGCGCGGGCUCGGG | 1475 |
| 75 | CCCGCGCCGCCGCCGCCGC | 1007 | 75 | CCCGCGCCGCCGCCGCCGC | 1007 | 93 | GCGGCGGCGGCGGCGCGGG | 1476 |
| 93 | CCGCCCGAACAGCCUCCCA | 1008 | 93 | CCGCCCGAACAGCCUCCCA | 1008 | 111 | UGGGAGGCUGUUCGGGCGG | 1477 |
| 111 | AGCCUGGGCCCCCGGCGGC | 1009 | 111 | AGCCUGGGCCCCCGGCGGC | 1009 | 129 | GCCGCCGGGGGCCCAGGCU | 1478 |
| 129 | CGCCGUGGCCGCGUCCCGG | 1010 | 129 | CGCCGUGGCCGCGUCCCGG | 1010 | 147 | CCGGGACGCGGCCACGGCG | 1479 |
| 147 | GCUGUCGCCGCCCGAGCCC | 1011 | 147 | GCUGUCGCCGCCCGAGCCC | 1011 | 165 | GGGCUCGGGCGGCGACAGC | 1480 |
| 165 | CGAGCCCGCGCGCCGGCGG | 1012 | 165 | CGAGCCCGCGCGCCGGCGG | 1012 | 183 | CCGCCGGCGCGCGGGCUCG | 1481 |
| 183 | GGUGGCGGCGCAGGCUGAG | 1013 | 183 | GGUGGCGGCGCAGGCUGAG | 1013 | 201 | CUCAGCCUGCGCCGCCACC | 1482 |
| 201 | GGAGAUGCGGCGCGGAGCG | 1014 | 201 | GGAGAUGCGGCGCGGAGCG | 1014 | 219 | CGCUCCGCGCCGCAUCUCC | 1483 |
| 219 | GCCGGAGCAGGGCUAGAGC | 1015 | 219 | GCCGGAGCAGGGCUAGAGC | 1015 | 237 | GCUCUAGCCCUGCUCCGGC | 1484 |
| 237 | CCGGCCGCCGCCGCCCGCC | 1016 | 237 | CCGGCCGCCGCCGCCCGCC | 1016 | 255 | GGCGGGCGGCGGCGGCCGG | 1485 |
| 255 | CGCGGUAAGCGCAGCCCCG | 1017 | 255 | CGCGGUAAGCGCAGCCCCG | 1017 | 273 | CGGGGCUGCGCUUACCGCG | 1486 |
| 273 | GGCCCGGCGCCCGCGGGCC | 1018 | 273 | GGCCCGGCGCCCGCGGGCC | 1018 | 291 | GGCCCGCGGGCGCCGGGCC | 1487 |
| 291 | CAUUGUCCGCCGCCCGCCC | 1019 | 291 | CAUUGUCCGCCGCCCGCCC | 1019 | 309 | GGGCGGGCGGCGGACAAUG | 1488 |
| 309 | CCGCGCCCCGCGCAGCCUG | 1020 | 309 | CCGCGCCCCGCGCAGCCUG | 1020 | 327 | CAGGCUGCGCGGGGCGCGG | 1489 |
| 327 | GCAGGCCUUGGAGCCCGCG | 1021 | 327 | GCAGGCCUUGGAGCCCGCG | 1021 | 345 | CGCGGGCUCCAAGGCCUGC | 1490 |
| 345 | GGCAGGUGGACGCCGCCGG | 1022 | 345 | GGCAGGUGGACGCCGCCGG | 1022 | 363 | CCGGGGGCGUCCACCUGCC | 1491 |
| 363 | GUCCACACCCGCCCCGCGC | 1023 | 363 | GUCCACACCCGCCCCGCGC | 1023 | 381 | GCGCGGGGCGGGUGUGGAC | 1492 |
| 381 | CGCGGCCGUGGGAGGCGGG | 1024 | 381 | CGCGGCCGUGGGAGGCGGG | 1024 | 399 | CCCGCCUCCCACGGCCGCG | 1493 |
| 399 | GGGCCAGCGCUGGCCGCGC | 1025 | 399 | GGGCCAGCGCUGGCCGCGC | 1025 | 417 | GCGCGGCCAGCGCUGGCCC | 1494 |
| 417 | CGCCGUGGGACCCGCCGGU | 1026 | 417 | CGCCGUGGGACCCGCCGGU | 1026 | 435 | ACCGGCGGGUCCCACGGCG | 1495 |
| 435 | UCCCCAGGGCCGCCCGGCC | 1027 | 435 | UCCCCAGGGCCGCCCGGCC | 1027 | 453 | GGCCGGGCGGCCCUGGGGA | 1496 |
| 453 | CCCUUCUGGACCUUUCCAC | 1028 | 453 | CCCUUCUGGACCUUUCCAC | 1028 | 471 | GUGGAAAGGUCCAGAAGGG | 1497 |
| 471 | CCCGCGCCGCGAGGCGGCU | 1029 | 471 | CCCGCGCCGCGAGGCGGCU | 1029 | 489 | AGCCGCCUCGCGGCGCGGG | 1498 |
| 489 | UUCGCCCGCCGGGGCGGGG | 1030 | 489 | UUCGCCCGCCGGGGCGGGG | 1030 | 507 | CCCCGCCCCGGCGGGCGAA | 1499 |
| 507 | GGCGCGGGGGUGGGCACGG | 1031 | 507 | GGCGCGGGGGUGGGCACGG | 1031 | 525 | CCGUGCCCACCCCCGCGCC | 1500 |
| 525 | GCAGGCAGCGGCGCCGUCU | 1032 | 525 | GCAGGCAGCGGCGCCGUCU | 1032 | 543 | AGACGGCGCCGCUGCCUGC | 1501 |
| 543 | UCCCGGUGCGGGGCCCGCG | 1033 | 543 | UCCCGGUGCGGGGCCCGCG | 1033 | 561 | CGCGGGCCCCGCACCGGGA | 1502 |
| 561 | GCCCCCCGAGCAGGUUCAU | 1034 | 561 | GCCCCCCGAGCAGGUUCAU | 1034 | 579 | AUGAACCUGCUCGGGGGGC | 1503 |
| 579 | UCUGCAGAAGCCAGCGGAC | 1035 | 579 | UCUGCAGAAGCCAGCGGAC | 1035 | 597 | GUCCGCUGGCUUCUGCAGA | 1504 |
| 597 | CGCCUCUGUUCAACUUGUG | 1036 | 597 | CGCCUCUGUUCAACUUGUG | 1036 | 615 | CACAAGUUGAACAGAGGCG | 1505 |
| 615 | GGGUUACCUGGCUCAUGAG | 1037 | 615 | GGGUUACCUGGCUCAUGAG | 1037 | 633 | CUCAUGAGCCAGGUAACCC | 1506 |
| 633 | GACCUUGCCGGCGAGGCUC | 1038 | 633 | GACCUUGCCGGCGAGGCUC | 1038 | 651 | GAGCCUCGCCGGCAAGGUC | 1507 |
| 651 | CGGCGCUUGAACGUCUGUG | 1039 | 651 | CGGCGCUUGAACGUCUGUG | 1039 | 669 | CACAGACGUUCAAGCGCCG | 1508 |
| 669 | GACCCAGCCCUCACCGUCC | 1040 | 669 | GACCCAGCCCUCACCGUCC | 1040 | 687 | GGACGGUGAGGGCUGGGUC | 1509 |
| 687 | CCGGUACUUGUAUGUGUUG | 1041 | 687 | CCGGUACUUGUAUGUGUUG | 1041 | 705 | CAACACAUACAAGUACCGG | 1510 |
| 705 | GGUGGGAGUUUGGAGCUCG | 1042 | 705 | GGUGGGAGUUUGGAGCUCG | 1042 | 723 | CGAGCUCCAAACUCCCACC | 1511 |
| 723 | GUUGGAGCUAUCGUUUCCG | 1043 | 723 | GUUGGAGCUAUCGUUUCCG | 1043 | 741 | CGGAAACGAUAGCUCCAAC | 1512 |
| 741 | GUGGAAAUUUUGAGCCAUU | 1044 | 741 | GUGGAAAUUUUGAGCCAUU | 1044 | 759 | AAUGGCUCAAAAUUUCCAC | 1513 |
| 759 | UUCGAAUCACUUAAAGGAG | 1045 | 759 | UUCGAAUCACUUAAAGGAG | 1045 | 777 | CUCCUUUAAGUGAUUCGAA | 1514 |
| 777 | GUGGACAUUGCUAGCAAUG | 1046 | 777 | GUGGACAUUGCUAGCAAUG | 1046 | 795 | CAUUGCUAGCAAUGUCCAC | 1515 |
| 795 | GAGCUCCCAAAGCCAUCCA | 1047 | 795 | GAGCUCCCAAAGCCAUCCA | 1047 | 813 | UGGAUGGCUUUGGGAGCUC | 1516 |
| 813 | AGAUGGACUUUCUGGCCGA | 1048 | 813 | AGAUGGACUUUCUGGCCGA | 1048 | 831 | UCGGCCAGAAAGUCCAUCU | 1517 |
| 831 | AGACCAGCCAGUGGAGCUG | 1049 | 831 | AGACCAGCCAGUGGAGCUG | 1049 | 849 | CAGCUCCACUGGCUGGUCU | 1518 |
| 849 | GCUGAAUCCUGCCCGCGUG | 1050 | 849 | GCUGAAUCCUGCCCGCGUG | 1050 | 867 | CACGCGGGCAGGAUUCAGC | 1519 |
| 867 | GAACCACAUGCCCAGCACG | 1051 | 867 | GAACCACAUGCCCAGCACG | 1051 | 885 | CGUGCUGGGCAUGUGGUUC | 1520 |
| 885 | GGUGGAUGUGGCCACGGCG | 1052 | 885 | GGUGGAUGUGGCCACGGCG | 1052 | 903 | CGCCGUGGCCACAUCCACC | 1521 |
| 903 | GCUGCCUCUGCAAGUGGCC | 1053 | 903 | GCUGCCUCUGCAAGUGGCC | 1053 | 921 | GGCCACUUGCAGAGGCAGC | 1522 |
| 921 | CCCCUCGGCAGUGCCCAUG | 1054 | 921 | CCCCUCGGCAGUGCCCAUG | 1054 | 939 | CAUGGGCACUGCCGAGGGG | 1523 |
| 939 | GGACCUGCGCCUGGACCAC | 1055 | 939 | GGACCUGCGCCUGGACCAC | 1055 | 957 | GUGGUCCAGGCGCAGGUCC | 1524 |
| 957 | CCAGUUCUCACUGCCUGUG | 1056 | 957 | CCAGUUCUCACUGCCUGUG | 1056 | 975 | CACAGGCAGUGAGAACUGG | 1525 |
| 975 | GGCAGAGCCGGCCCUGCGG | 1057 | 975 | GGCAGAGCCGGCCCUGCGG | 1057 | 993 | CCGCAGGGCCGGCUCUGCC | 1526 |
| 993 | GGAGCAGCAGCUGCAGCAG | 1058 | 993 | GGAGCAGCAGCUGCAGCAG | 1058 | 1011 | CUGCUGCAGCUGCUGCUCC | 1527 |
| 1011 | GGAGCUCCUGGCGCUCAAG | 1059 | 1011 | GGAGCUCCUGGCGCUCAAG | 1059 | 1029 | CUUGAGCGCCAGGAGCUCC | 1528 |
| 1029 | GCAGAAGCAGCAGAUCCAG | 1060 | 1029 | GCAGAAGCAGCAGAUCCAG | 1060 | 1047 | CUGGAUCUGCUGCUUCUGC | 1529 |
| 1047 | GAGGCAGAUCCUCAUCGCU | 1061 | 1047 | GAGGCAGAUCCUCAUCGCU | 1061 | 1065 | AGCGAUGAGGAUCUGCCUC | 1530 |
| 1065 | UGAGUUCCAGAGGCAGCAC | 1062 | 1065 | UGAGUUCCAGAGGCAGCAC | 1062 | 1083 | GUGCUGCCUCUGGAACUCA | 1531 |
| 1083 | CGAGCAGCUCUCCCGGCAG | 1063 | 1083 | CGAGCAGCUCUCCCGGCAG | 1063 | 1101 | CUGCCGGGAGAGCUGCUCG | 1532 |
| 1101 | GCACGAGGCGCAGCUCCAC | 1064 | 1101 | GCACGAGGCGCAGCUCCAC | 1064 | 1119 | GUGGAGCUGCGCCUCGUGC | 1533 |
| 1119 | CGAGCACAUCAAGCAACAA | 1065 | 1119 | CGAGCACAUCAAGCAACAA | 1065 | 1137 | UUGUUGCUUGAUGUGCUCG | 1534 |
| 1137 | ACAGGAGAUGCUGGCCAUG | 1066 | 1137 | ACAGGAGAUGCUGGCCAUG | 1066 | 1155 | CAUGGCCAGCAUCUCCUGU | 1535 |
| 1155 | GAAGCACCAGCAGGAGCUG | 1067 | 1155 | GAAGCACCAGCAGGAGCUG | 1067 | 1173 | CAGCUCCUGCUGGUGCUUC | 1536 |
| 1173 | GCUGGAACACCAGCGGAAG | 1068 | 1173 | GCUGGAACACCAGCGGAAG | 1068 | 1191 | CUUCCGCUGGUGUUCCAGC | 1537 |
| 1191 | GCUGGAGAGGCACCGCCAG | 1069 | 1191 | GCUGGAGAGGCACCGCCAG | 1069 | 1209 | CUGGCGGUGCCUCUCCAGC | 1538 |
| 1209 | GGAGCAGGAGCUGGAGAAG | 1070 | 1209 | GGAGCAGGAGCUGGAGAAG | 1070 | 1227 | CUUCUCCAGCUCCUGCUCC | 1539 |
| 1227 | GCAGCACCGGGAGCAGAAG | 1071 | 1227 | GCAGCACCGGGAGCAGAAG | 1071 | 1245 | CUUCUGCUCCCGGUGCUGC | 1540 |
| 1245 | GCUGCAGCAGCUCAAGAAC | 1072 | 1245 | GCUGCAGCAGCUCAAGAAC | 1072 | 1263 | GUUCUUGAGCUGCUGCAGC | 1541 |
| 1263 | CAAGGAGAAGGGCAAAGAG | 1073 | 1263 | CAAGGAGAAGGGCAAAGAG | 1073 | 1281 | CUCUUUGCCCUUCUCCUUG | 1542 |
| 1281 | GAGUGCCGUGGCCAGCACA | 1074 | 1281 | GAGUGCCGUGGCCAGCACA | 1074 | 1299 | UGUGCUGGCCACGGCACUC | 1543 |
| 1299 | AGAAGUGAAGAUGAAGUUA | 1075 | 1299 | AGAAGUGAAGAUGAAGUUA | 1075 | 1317 | UAACUUCAUCUUCACUUCU | 1544 |
| 1317 | ACAAGAAUUUGUCCUCAAU | 1076 | 1317 | ACAAGAAUUUGUCCUCAAU | 1076 | 1335 | AUUGAGGACAAAUUCUUGU | 1545 |
| 1335 | UAAAAAGAAGGCGCUGGCC | 1077 | 1335 | UAAAAAGAAGGCGCUGGCC | 1077 | 1353 | GGCCAGCGCCUUCUUUUUA | 1546 |
| 1353 | CCACCGGAAUCUGAACCAC | 1078 | 1353 | CCACCGGAAUCUGAACCAC | 1078 | 1371 | GUGGUUCAGAUUCCGGUGG | 1547 |
| 1371 | CUGCAUUUCCAGCGACCCU | 1079 | 1371 | CUGCAUUUCCAGCGAGCCU | 1079 | 1389 | AGGGUCGCUGGAAAUGCAG | 1548 |
| 1389 | UCGCUACUGGUACGGGAAA | 1080 | 1389 | UCGCUACUGGUACGGGAAA | 1080 | 1407 | UUUCCCGUACCAGUAGCGA | 1549 |
| 1407 | AACGCAGCACAGUUCCCUU | 1081 | 1407 | AACGCAGCACAGUUCCCUU | 1081 | 1425 | AAGGGAACUGUGCUGCGUU | 1550 |
| 1425 | UGACCAGAGUUCUCCACCC | 1082 | 1425 | UGACCAGAGUUCUCCACCC | 1082 | 1443 | GGGUGGAGAACUCUGGUCA | 1551 |
| 1443 | CCAGAGCGGAGUGUCGACC | 1083 | 1443 | CCAGAGCGGAGUGUCGACC | 1083 | 1461 | GGUCGACACUCCGCUCUGG | 1552 |
| 1461 | CUCCUAUAACCACCCGGUC | 1084 | 1461 | CUCCUAUAACCACCCGGUC | 1084 | 1479 | GACCGGGUGGUUAUAGGAG | 1553 |
| 1479 | CCUGGGAAUGUACGACGCC | 1085 | 1479 | CCUGGGAAUGUACGACGCC | 1085 | 1497 | GGCGUCGUACAUUCCCAGG | 1554 |
| 1497 | CAAAGAUGACUUCCCUCUU | 1086 | 1497 | CAAAGAUGACUUCCCUCUU | 1086 | 1515 | AAGAGGGAAGUCAUCUUUG | 1555 |
| 1515 | UAGGAAAACAGCUUCUGAA | 1087 | 1515 | UAGGAAAACAGCUUCUGAA | 1087 | 1533 | UUCAGAAGCUGUUUUCCUA | 1556 |
| 1533 | ACCGAAUCUGAAAUUAGGG | 1088 | 1533 | ACCGAAUCUGAAAUUACGG | 1088 | 1551 | CCGUAAUUUCAGAUUCGGU | 1557 |
| 1551 | GUCCAGGCUAAAGCAGAAA | 1089 | 1551 | GUCCAGGCUAAAGCAGAAA | 1089 | 1569 | UUUCUGCUUUAGCCUGGAC | 1558 |
| 1569 | AGUGGCCGAAAGACGGAGC | 1090 | 1569 | AGUGGCCGAAAGACGGAGC | 1090 | 1587 | GCUCCGUCUUUCGGCCACU | 1559 |
| 1587 | CAGCCCCCUGUUACGCAGG | 1091 | 1587 | CAGCCCCCUGUUACGCAGG | 1091 | 1605 | CCUGCGUAACAGGGGGCUG | 1560 |
| 1605 | GAAAGACGGGCCAGUGGUC | 1092 | 1605 | GAAAGACGGGCCAGUGGUC | 1092 | 1623 | GACCACUGGCCCGUCUUUC | 1561 |
| 1623 | CACUGCUCUAAAAAAGCGU | 1093 | 1623 | CACUGCUCUAAAAAAGCGU | 1093 | 1641 | ACGCUUUUUUAGAGCAGUG | 1562 |
| 1641 | UCCGUUGGAUGUCACAGAC | 1094 | 1641 | UCCGUUGGAUGUCACAGAC | 1094 | 1659 | GUCUGUGACAUCCAACGGA | 1563 |
| 1659 | CUCCGCGUGCAGCAGCGCC | 1095 | 1659 | CUCCGCGUGCAGCAGCGCC | 1095 | 1677 | GGCGCUGCUGCACGCGGAG | 1564 |
| 1677 | CCCAGGCUCCGGACCCAGC | 1096 | 1677 | CCCAGGCUCCGGACCCAGC | 1096 | 1695 | GCUGGGUCCGGAGCCUGGG | 1565 |
| 1695 | CUCACCCAACAACAGCUCC | 1097 | 1695 | CUCACCCAACAACAGCUCC | 1097 | 1713 | GGAGCUGUUGUUGGGUGAG | 1566 |
| 1713 | CGGGAGCGUCAGCGCGGAG | 1098 | 1713 | CGGGAGCGUCAGCGCGGAG | 1098 | 1731 | CUCCGCGCUGACGCUCCCG | 1567 |
| 1731 | GAACGGUAUCGCGCCCGCC | 1099 | 1731 | GAACGGUAUCGCGCCCGCC | 1099 | 1749 | GGCGGGCGCGAUACCGUUC | 1568 |
| 1749 | CGUCCCCAGCAUCCCGGCG | 1100 | 1749 | CGUCCCCAGCAUCCCGGCG | 1100 | 1767 | CGCCGGGAUGCUGGGGACG | 1569 |
| 1767 | GGAGACGAGUUUGGCGCAC | 1101 | 1767 | GGAGACGAGUUUGGCGCAC | 1101 | 1785 | GUGCGCCAAACUCGUCUCC | 1570 |
| 1785 | CAGACUUGUGGCACGAGAA | 1102 | 1785 | CAGACUUGUGGCACGAGAA | 1102 | 1803 | UUCUCGUGCCACAAGUCUG | 1571 |
| 1803 | AGGCUCGGCCGCUCCACUU | 1103 | 1803 | AGGCUCGGCCGCUCCACUU | 1103 | 1821 | AAGUGGAGCGGCCGAGCCU | 1572 |
| 1821 | UCCCCUCUACACAUCGCCA | 1104 | 1821 | UCCCCUCUACACAUCGCCA | 1104 | 1839 | UGGCGAUGUGUAGAGGGGA | 1573 |
| 1839 | AUCCUUGCCCAACAUCACG | 1105 | 1839 | AUCCUUGCCCAACAUCACG | 1105 | 1857 | CGUGAUGUUGGGCAAGGAU | 1574 |
| 1857 | GCUGGGCCUGCCUGCCACC | 1106 | 1857 | GCUGGGCCUGCCUGCCACC | 1106 | 1875 | GGUGGCAGGCAGGCCCAGC | 1575 |
| 1875 | CGGCCCCUCUGCGGGCACG | 1107 | 1875 | CGGCCCCUCUGCGGGCACG | 1107 | 1893 | CGUGCCCGCAGAGGGGCCG | 1576 |
| 1893 | GGCGGGCCAGCAGGACACC | 1108 | 1893 | GGCGGGCCAGCAGGACACC | 1108 | 1911 | GGUGUCCUGCUGGCCCGCC | 1577 |
| 1911 | CGAGAGACUCACCCUUCCC | 1109 | 1911 | CGAGAGACUCACCCUUCCC | 1109 | 1929 | GGGAAGGGUGAGUCUCUCG | 1578 |
| 1929 | CGCCCUCCAGCAGAGGCUC | 1110 | 1929 | CGCCCUCCAGCAGAGGCUC | 1110 | 1947 | GAGCCUCUGCUGGAGGGCG | 1579 |
| 1947 | CUCCCUUUUCCCCGGCACC | 1111 | 1947 | CUCCCUUUUCCCCGGCACC | 1111 | 1965 | GGUGCCGGGGAAAAGGGAG | 1580 |
| 1965 | CCACCUCACUCCCUACCUG | 1112 | 1965 | CCACCUCACUCCCUACCUG | 1112 | 1983 | CAGGUAGGGAGUGAGGUGG | 1581 |
| 1983 | GAGCACCUCGCCCUUGGAG | 1113 | 1983 | GAGCACCUCGCCCUUGGAG | 1113 | 2001 | CUCCAAGGGCGAGGUGCUC | 1582 |
| 2001 | GCGGGACGGAGGGGCAGCG | 1114 | 2001 | GCGGGACGGAGGGGCAGCG | 1114 | 2019 | CGCUGCCCCUCCGUCCCGC | 1583 |
| 2019 | GCACAGCCCUCUUCUGCAG | 1115 | 2019 | GCACAGCCCUCUUCUGCAG | 1115 | 2037 | CUGCAGAAGAGGGCUGUGC | 1584 |
| 2037 | GCACAUGGUCUUACUGGAG | 1116 | 2037 | GCACAUGGUCUUACUGGAG | 1116 | 2055 | CUCCAGUAAGACCAUGUGC | 1585 |
| 2055 | GCAGCCACCGGCACAAGCA | 1117 | 2055 | GCAGCCACCGGCACAAGCA | 1117 | 2073 | UGCUUGUGCCGGUGGCUGC | 1586 |
| 2073 | ACCCCUCGUCACAGGCCUG | 1118 | 2073 | ACCCCUCGUCACAGGCCUG | 1118 | 2091 | CAGGCCUGUGACGAGGGGU | 1587 |
| 2091 | GGGAGCACUGCCCCUCCAC | 1119 | 2091 | GGGAGCACUGCCCCUCCAC | 1119 | 2109 | GUGGAGGGGCAGUGCUCCC | 1588 |
| 2109 | CGCACAGUCCUUGGUUGGU | 1120 | 2109 | CGCAGAGUCCUUGGUUGGU | 1120 | 2127 | ACCAACCAAGGACUGUGCG | 1589 |
| 2127 | UGCAGACCGGGUGUCCCCC | 1121 | 2127 | UGCAGACCGGGUGUCCCCC | 1121 | 2145 | GGGGGACACCCGGUCUGCA | 1590 |
| 2145 | CUCCAUCCAGAAGCUGCGG | 1122 | 2145 | CUCCAUCCACAAGCUGCGG | 1122 | 2163 | CCGCAGCUUGUGGAUGGAG | 1591 |
| 2163 | GCAGCACCGCCCACUGGGG | 1123 | 2163 | GCAGCACCGCCCACUGGGG | 1123 | 2181 | CCCCAGUGGGCGGUGCUGC | 1592 |
| 2181 | GCGGACCCAGUCGGCCCCG | 1124 | 2181 | GCGGACCCAGUCGGCCCCG | 1124 | 2199 | CGGGGCCGACUGGGUCCGC | 1593 |
| 2199 | GCUGCCCCAGAACGCCCAG | 1125 | 2199 | GCUGCCCCAGAACGCCCAG | 1125 | 2217 | CUGGGCGUUCUGGGGCAGC | 1594 |
| 2217 | GGCUCUGCAGCACCUGGUC | 1126 | 2217 | GGCUCUGCAGCACCUGGUC | 1126 | 2235 | GACCAGGUGCUGCAGAGCC | 1595 |
| 2235 | CAUCCAGCAGCAGCAUCAG | 1127 | 2235 | CAUCCAGCAGCAGCAUCAG | 1127 | 2253 | CUGAUGCUGCUGCUGGAUG | 1596 |
| 2253 | GCAGUUUCUGGAGAAACAC | 1128 | 2253 | GCAGUUUCUGGAGAAACAC | 1128 | 2271 | GUGUUUCUCCAGAAACUGC | 1597 |
| 2271 | CAAGCAGCAGUUCCAGCAG | 1129 | 2271 | CAAGCAGCAGUUCCAGCAG | 1129 | 2289 | CUGCUGGAACUGCUGCUUG | 1598 |
| 2289 | GCAGCAACUGCAGAUGAAC | 1130 | 2289 | GCAGCAACUGCAGAUGAAC | 1130 | 2307 | GUUCAUCUGCAGUUGCUGC | 1599 |
| 2307 | CAAGAUCAUCCCCAAGCCA | 1131 | 2307 | CAAGAUCAUCCCCAAGCCA | 1131 | 2325 | UGGCUUGGGGAUGAUCUUG | 1600 |
| 2325 | AAGCGAGCCAGCCCGGCAG | 1132 | 2325 | AAGCGAGCCAGCCCGGCAG | 1132 | 2343 | CUGCCGGGCUGGCUCGCUU | 1601 |
| 2343 | GCCGGAGAGCCACCCGGAG | 1133 | 2343 | GCCGGAGAGCCACCCGGAG | 1133 | 2361 | CUCCGGGUGGCUCUCCGGC | 1602 |
| 2361 | GGAGACGGAGGAGGAGCUC | 1134 | 2361 | GGAGACGGAGGAGGAGCUC | 1134 | 2379 | GAGCUCCUCCUCCGUCUCC | 1603 |
| 2379 | CCGUGAGCACCAGGCUCUG | 1135 | 2379 | CCGUGAGCACCAGGCUCUG | 1135 | 2397 | CAGAGCCUGGUGCUCACGG | 1604 |
| 2397 | GCUGGACGAGCCCUACCUG | 1136 | 2397 | GCUGGACGAGCCCUACCUG | 1136 | 2415 | CAGGUAGGGCUCGUCCAGC | 1605 |
| 2415 | GGACCGGCUGCCGGGGCAG | 1137 | 2415 | GGACCGGCUGCCGGGGCAG | 1137 | 2433 | CUGCCCCGGCAGCCGGUCC | 1606 |
| 2433 | GAAGGAGGCGCACGCACAG | 1138 | 2433 | GAAGGAGGCGCACGCACAG | 1138 | 2451 | CUGUGCGUGCGCCUCCUUC | 1607 |
| 2451 | GGCCGGCGUGCAGGUGAAG | 1139 | 2451 | GGCCGGCGUGCAGGUGAAG | 1139 | 2469 | CUUCACCUGCACGCCGGCC | 1608 |
| 2469 | GCAGGAGCCCAUUGAGAGC | 1140 | 2469 | GCAGGAGCCCAUUGAGAGC | 1140 | 2487 | GCUCUCAAUGGGCUCCUGC | 1609 |
| 2487 | CGAUGAGGAAGAGGCAGAG | 1141 | 2487 | CGAUGAGGAAGAGGCAGAG | 1141 | 2505 | CUCUGCCUCUUCCUCAUCG | 1610 |
| 2505 | GCCCCCACGGGAGGUGGAG | 1142 | 2505 | GCCCCCACGGGAGGUGGAG | 1142 | 2523 | CUCCACCUCCCGUGGGGGC | 1611 |
| 2523 | GCCGGGCCAGCGCCAGCCC | 1143 | 2523 | GCCGGGCCAGCGCCAGCCC | 1143 | 2541 | GGGCUGGCGCUGGCCCGGC | 1612 |
| 2541 | CAGUGAGCAGGAGCUGCUC | 1144 | 2541 | CAGUGAGCAGGAGCUGCUC | 1144 | 2559 | GAGCAGCUCCUGCUCACUG | 1613 |
| 2559 | CUUCAGACAGCAAGCCCUC | 1145 | 2559 | CUUCAGACAGCAAGCCCUC | 1145 | 2577 | GAGGGCUUGCUGUCUGAAG | 1614 |
| 2577 | CCUGCUGGAGCAGCAGCGG | 1146 | 2577 | CCUGCUGGAGCAGCAGCGG | 1146 | 2595 | CCGCUGCUGCUCCAGCAGG | 1615 |
| 2595 | GAUCCACCAGCUGAGGAAC | 1147 | 2595 | GAUCCACCAGCUGAGGAAC | 1147 | 2613 | GUUCCUCAGCUGGUGGAUC | 1616 |
| 2613 | CUACCAGGCGUCCAUGGAG | 1148 | 2613 | CUACCAGGCGUCCAUGGAG | 1148 | 2631 | CUCCAUGGACGCCUGGUAG | 1617 |
| 2631 | GGCCGCCGGCAUCCCCGUG | 1149 | 2631 | GGCCGCCGGCAUCCCCGUG | 1149 | 2649 | CACGGGGAUGCCGGCGGCC | 1618 |
| 2649 | GUCCUUCGGCGGCCACAGG | 1150 | 2649 | GUCCUUCGGCGGCCACAGG | 1150 | 2667 | CCUGUGGCCGCCGAAGGAC | 1619 |
| 2667 | GCCUCUGUCCCGGGCGCAG | 1151 | 2667 | GCCUCUGUCCCGGGCGCAG | 1151 | 2685 | CUGCGCCCGGGACAGAGGC | 1620 |
| 2685 | GUCCUCACCCGCGUCUGCC | 1152 | 2685 | GUCCUCACCCGCGUCUGCC | 1152 | 2703 | GGCAGACGCGGGUGAGGAC | 1621 |
| 2703 | CACCUUCCCCGUGUCUGUG | 1153 | 2703 | CACCUUCCCCGUGUCUGUG | 1153 | 2721 | CACAGACACGGGGAAGGUG | 1622 |
| 2721 | GCAGGAGCCCCCCACCAAG | 1154 | 2721 | GCAGGAGCCCCCCACCAAG | 1154 | 2739 | CUUGGUGGGGGGCUCCUGC | 1623 |
| 2739 | GCCGAGGUUCACGACAGGC | 1155 | 2739 | GCCGAGGUUCACGACAGGC | 1155 | 2757 | GGCUGUCGUGAACCUCGGC | 1624 |
| 2757 | CCUCGUGUAUGACACGCUG | 1156 | 2757 | CCUCGUGUAUGACACGCUG | 1156 | 2775 | CAGCGUGUCAUACACGAGG | 1625 |
| 2775 | GAUGCUGAAGCACCAGUGC | 1157 | 2775 | GAUGCUGAAGCACCAGUGC | 1157 | 2793 | GCACUGGUGCUUCAGCAUC | 1626 |
| 2793 | CACCUGCGGGAGUAGCAGC | 1158 | 2793 | CACCUGCGGGAGUAGCAGC | 1158 | 2811 | GCUGCUACUCCCGCAGGUG | 1627 |
| 2811 | CAGCCACCCCGAGCACGCC | 1159 | 2811 | CAGCCACCCCGAGCACGCC | 1159 | 2829 | GGCGUGCUCGGGGUGGCUG | 1628 |
| 2829 | CGGGAGGAUCCAGAGCAUC | 1160 | 2829 | CGGGAGGAUCCAGAGCAUC | 1160 | 2847 | GAUGCUCUGGAUCCUCCCG | 1629 |
| 2847 | CUGGUCCCGCCUGCAGGAG | 1161 | 2847 | CUGGUCCCGCCUGCAGGAG | 1161 | 2865 | CUCCUGCAGGCGGGACCAG | 1630 |
| 2865 | GACGGGCCUCCGGGGCAAA | 1162 | 2865 | GACGGGCCUCCGGGGCAAA | 1162 | 2883 | UUUGCCCCGGAGGCCCGUC | 1631 |
| 2883 | AUGCGAGUGCAUCCGCGGA | 1163 | 2883 | AUGCGAGUGCAUCCGCGGA | 1163 | 2901 | UCCGCGGAUGCACUCGCAU | 1632 |
| 2901 | ACGCAAGGCCACCCUGGAG | 1164 | 2901 | ACGCAAGGCCACCCUGGAG | 1164 | 2919 | CUCCAGGGUGGCCUUGCGU | 1633 |
| 2919 | GGAGCUACAGACGGUGCAC | 1165 | 2919 | GGAGCUACAGACGGUGCAC | 1165 | 2937 | GUGCACCGUCUGUAGCUCC | 1634 |
| 2937 | CUCGGAAGCCCACACCCUC | 1166 | 2937 | CUCGGAAGCCCACACCCUC | 1166 | 2955 | GAGGGUGUGGGCUUCCGAG | 1635 |
| 2955 | CCUGUAUGGCACGAACCCC | 1167 | 2955 | CCUGUAUGGCACGAACCCC | 1167 | 2973 | GGGGUUCGUGCCAUACAGG | 1636 |
| 2973 | CCUCAACCGGCAGAAACUG | 1168 | 2973 | CCUCAACCGGCAGAAACUG | 1168 | 2991 | CAGUUUCUGCCGGUUGAGG | 1637 |
| 2991 | GGACAGUAAGAAACUUCUA | 1169 | 2991 | GGACAGUAAGAAACUUCUA | 1169 | 3009 | UAGAAGUUUCUUACUGUCC | 1638 |
| 3009 | AGGCUCGCUCGCCUCCGUG | 1170 | 3009 | AGGCUCGCUCGCCUCCGUG | 1170 | 3027 | CACGGAGGCGAGCGAGCCU | 1639 |
| 3027 | GUUCGUCCGGCUCCCUUGC | 1171 | 3027 | GUUCGUCCGGCUCCCUUGC | 1171 | 3045 | GCAAGGGAGCCGGACGAAC | 1640 |
| 3045 | CGGUGGUGUUGGGGUGGAC | 1172 | 3045 | CGGUGGUGUUGGGGUGGAC | 1172 | 3063 | GUCCACCCCAACACCACCG | 1641 |
| 3063 | CAGUGACACCAUAUGGAAC | 1173 | 3063 | CAGUGACACCAUAUGGAAC | 1173 | 3081 | GUUCCAUAUGGUGUCACUG | 1642 |
| 3081 | CGAGGUGCACUCGGCGGGG | 1174 | 3081 | CGAGGUGCACUCGGCGGGG | 1174 | 3099 | CCCCGCCGAGUGCACCUCG | 1643 |
| 3099 | GGCAGCCCGCCUGGCUGUG | 1175 | 3099 | GGCAGCCCGCCUGGCUGUG | 1175 | 3117 | CACAGCCAGGCGGGCUGCC | 1644 |
| 3117 | GGGCUGCGUGGUAGAGCUG | 1176 | 3117 | GGGCUGCGUGGUAGAGCUG | 1176 | 3135 | CAGCUCUACCACGCAGCCC | 1645 |
| 3135 | GGUCUUCAAGGUGGCCACA | 1177 | 3135 | GGUCUUCAAGGUGGCCACA | 1177 | 3153 | UGUGGCCACCUUGAAGACC | 1646 |
| 3153 | AGGGGAGCUGAAGAAUGGC | 1178 | 3153 | AGGGGAGCUGAAGAAUGGC | 1178 | 3171 | GCCAUUCUUCAGCUCCCCU | 1647 |
| 3171 | CUUUGCUGUGGUCCGCCCC | 1179 | 3171 | CUUUGCUGUGGUCCGCCCC | 1179 | 3189 | GGGGCGGACCACAGCAAAG | 1648 |
| 3189 | CCCUGGACACCAUGCGGAG | 1180 | 3189 | CCCUGGACACCAUGCGGAG | 1180 | 3207 | CUCCGCAUGGUGUCCAGGG | 1649 |
| 3207 | GGAGAGCACGCCCAUGGGC | 1181 | 3207 | GGAGAGCACGCCCAUGGGC | 1181 | 3225 | GCCCAUGGGCGUGCUCUCC | 1650 |
| 3225 | CUUUUGCUACUUCAACUCC | 1182 | 3225 | CUUUUGCUACUUCAACUCC | 1182 | 3243 | GGAGUUGAAGUAGCAAAAG | 1651 |
| 3243 | CGUGGCCGUGGCAGCCAAG | 1183 | 3243 | CGUGGCCGUGGCAGCCAAG | 1183 | 3261 | CUUGGCUGCCACGGCCACG | 1652 |
| 3261 | GCUUCUGCAGCAGAGGUUG | 1184 | 3261 | GCUUCUGCAGCAGAGGUUG | 1184 | 3279 | CAACCUCUGCUGCAGAAGC | 1653 |
| 3279 | GAGCGUGAGCAAGAUCCUC | 1185 | 3279 | GAGCGUGAGCAAGAUCCUC | 1185 | 3297 | GAGGAUCUUGCUCACGCUC | 1654 |
| 3297 | CAUCGUGGACUGGGACGUG | 1186 | 3297 | CAUCGUGGACUGGGACGUG | 1186 | 3315 | CACGUCCCAGUCCACGAUG | 1655 |
| 3315 | GCACCAUGGAAACGGGACC | 1187 | 3315 | GCACCAUGGAAACGGGACC | 1187 | 3333 | GGUCCCGUUUCCAUGGUGC | 1656 |
| 3333 | GCAGCAGGCUUUCUACAGC | 1188 | 3333 | CCAGCAGGCUUUCUACAGC | 1188 | 3351 | GCUGUAGAAAGCCUGCUGG | 1657 |
| 3351 | CGACCCUAGCGUCCUGUAC | 1189 | 3351 | CGACCCUAGCGUCCUGUAC | 1189 | 3369 | GUACAGGACGCUAGGGUCG | 1658 |
| 3369 | CAUGUCCCUCCACCGCUAC | 1190 | 3369 | CAUGUCCCUCCACCGGUAC | 1190 | 3387 | GUAGCGGUGGAGGGACAUG | 1659 |
| 3387 | CGACGAUGGGAACUUCUUC | 1191 | 3387 | CGACGAUGGGAACUUCUUC | 1191 | 3405 | GAAGAAGUUCCCAUCGUCG | 1660 |
| 3405 | CCCAGGCAGCGGGGCUCCU | 1192 | 3405 | CCCAGGCAGCGGGGCUCCU | 1192 | 3423 | AGGAGCCCCGCUGCCUGGG | 1661 |
| 3423 | UGAUGAGGUGGGCACAGGG | 1193 | 3423 | UGAUGAGGUGGGCACAGGG | 1193 | 3441 | CCCUGUGCCCACCUCAUCA | 1662 |
| 3441 | GCCCGGCGUGGGUUUCAAC | 1194 | 3441 | GCCCGGCGUGGGUUUCAAC | 1194 | 3459 | GUUGAAACCCACGCCGGGC | 1663 |
| 3459 | CGUCAACAUGGCUUUCACC | 1195 | 3459 | CGUCAACAUGGCUUUCACC | 1195 | 3477 | GGUGAAAGCCAUGUUGACG | 1664 |
| 3477 | CGGCGGCCUGGACCCCCCC | 1196 | 3477 | CGGCGGCCUGGACCCCCCC | 1196 | 3495 | GGGGGGGUCCAGGCCGCCG | 1665 |
| 3495 | CAUGGGAGACGCUGAGUAC | 1197 | 3495 | CAUGGGAGACGCUGAGUAC | 1197 | 3513 | GUACUCAGCGUCUCCCAUG | 1666 |
| 3513 | CUUGGCGGCCUUCAGAACG | 1198 | 3513 | CUUGGCGGCCUUCAGAACG | 1198 | 3531 | CGUUCUGAAGGCCGCCAAG | 1667 |
| 3531 | GGUGGUCAUGCCGAUCGCC | 1199 | 3531 | GGUGGUCAUGCCGAUCGCC | 1199 | 3549 | GGCGAUCGGCAUGACCACC | 1668 |
| 3549 | CAGCGAGUUUGCCCCGGAU | 1200 | 3549 | CAGCGAGUUUGCCCCGGAU | 1200 | 3567 | AUCCGGGGCAAACUCGCUG | 1669 |
| 3567 | UGUGGUGCUGGUGUCAUCA | 1201 | 3567 | UGUGGUGCUGGUGUCAUCA | 1201 | 3585 | UGAUGACACCAGCACCACA | 1670 |
| 3585 | AGGCUUCGAUGCCGUGGAG | 1202 | 3585 | AGGCUUCGAUGCCGUGGAG | 1202 | 3603 | CUCCACGGCAUCGAAGCCU | 1671 |
| 3603 | GGGCCACCCCACCCCUCUU | 1203 | 3603 | GGGCCACCCCACCCCUCUU | 1203 | 3621 | AAGAGGGGUGGGGUGGCCC | 1672 |
| 3621 | UGGGGGCUACAACCUCUCC | 1204 | 3621 | UGGGGGCUACAACCUCUCC | 1204 | 3639 | GGAGAGGUUGUAGCCCCCA | 1673 |
| 3639 | CGCCAGAUGCUUCGGGUAC | 1205 | 3639 | CGCCAGAUGCUUCGGGUAC | 1205 | 3657 | GUACCCGAAGCAUCUGGCG | 1674 |
| 3657 | CCUGACGAAGCAGCUGAUG | 1206 | 3657 | CCUGACGAAGCAGCUGAUG | 1206 | 3675 | CAUCAGCUGCUUCGUCAGG | 1675 |
| 3675 | GGGCCUGGCUGGCGGCCGG | 1207 | 3675 | GGGCCUGGCUGGCGGCCGG | 1207 | 3693 | CCGGCCGCCAGCCAGGCCC | 1676 |
| 3693 | GAUUGUCCUGGCCCUCGAG | 1208 | 3693 | GAUUGUCCUGGCCCUCGAG | 1208 | 3711 | CUCGAGGGCCAGGACAAUC | 1677 |
| 3711 | GGGAGGCCACGACCUGACC | 1209 | 3711 | GGGAGGCCACGACCUGACC | 1209 | 3729 | GGUCAGGUCGUGGCCUCCC | 1678 |
| 3729 | CGCCAUUUGCGACGCCUCG | 1210 | 3729 | CGCCAUUUGCGACGCCUCG | 1210 | 3747 | CGAGGCGUCGCAAAUGGCG | 1679 |
| 3747 | GGAAGCAUGUGUUUCUGCC | 1211 | 3747 | GGAAGCAUGUGUUUCUGCC | 1211 | 3765 | GGCAGAAACACAUGCUUCC | 1680 |
| 3765 | CUUGCUGGGAAACGAGCUU | 1212 | 3765 | CUUGCUGGGAAACGAGCUU | 1212 | 3783 | AAGCUCGUUUCCCAGCAAG | 1681 |
| 3783 | UGAUCCUCUCCCAGAAAAG | 1213 | 3783 | UGAUCCUCUCCCAGAAAAG | 1213 | 3801 | CUUUUCUGGGAGAGGAUCA | 1682 |
| 3801 | GGUUUUACAGCAAAGACCC | 1214 | 3801 | GGUUUUACAGCAAAGACCC | 1214 | 3819 | GGGUCUUUGCUGUAAAACC | 1683 |
| 3819 | CAAUGCAAACGCUGUCCGU | 1215 | 3819 | CAAUGCAAACGCUGUCCGU | 1215 | 3837 | ACGGACAGCGUUUGCAUUG | 1684 |
| 3837 | UUCCAUGGAGAAAGUCAUG | 1216 | 3837 | UUCCAUGGAGAAAGUCAUG | 1216 | 3855 | CAUGACUUUCUCCAUGGAA | 1685 |
| 3855 | GGAGAUCCACAGCAAGUAC | 1217 | 3855 | GGAGAUCCACAGCAAGUAC | 1217 | 3873 | GUACUUGCUGUGGAUCUCC | 1686 |
| 3873 | CUGGCGCUGCCUGCAGCGC | 1218 | 3873 | CUGGCGCUGCCUGCAGCGC | 1218 | 3891 | GCGCUGCAGGCAGCGCCAG | 1687 |
| 3891 | CACAACCUCCACAGCGGGG | 1219 | 3891 | CACAACGUCCACAGCGGGG | 1219 | 3909 | CCCCGCUGUGGAGGUUGUG | 1688 |
| 3909 | GCGUUCUCUGAUCGAGGCU | 1220 | 3909 | GCGUUCUCUGAUCGAGGCU | 1220 | 3927 | AGGCUCGAUCAGAGAACGC | 1689 |
| 3927 | UCAGACUUGCGAGAACGAA | 1221 | 3927 | UCAGACUUGCGAGAACGAA | 1221 | 3945 | UUCGUUCUCGCAAGUCUGA | 1690 |
| 3945 | AGAAGCCGAGACGGUCACC | 1222 | 3945 | AGAAGCCGAGACGGUCACC | 1222 | 3963 | GGUGACCGUCUCGGCUUCU | 1691 |
| 3963 | CGCCAUGGCCUCGCUGUCC | 1223 | 3963 | CGCCAUGGCCUCGCUGUCC | 1223 | 3981 | GGACAGCGAGGCCAUGGCG | 1692 |
| 3981 | CGUGGGCGUGAAGCCCGCC | 1224 | 3981 | CGUGGGCGUGAAGCCCGCC | 1224 | 3999 | GGCGGGCUUCACGCCCACG | 1693 |
| 3999 | CGAAAAGAGACCAGAUGAG | 1225 | 3999 | CGAAAAGAGACCAGAUGAG | 1225 | 4017 | CUCAUCUGGUCUCUUUUCG | 1694 |
| 4017 | GGAGCCCAUGGAAGAGGAG | 1226 | 4017 | GGAGCCCAUGGAAGAGGAG | 1226 | 4035 | CUCCUCUUCCAUGGGCUCC | 1695 |
| 4035 | GCCGCCCCUGUAGCACUCC | 1227 | 4035 | GCCGCCCCUGUAGCACUCC | 1227 | 4053 | GGAGUGCUACAGGGGCGGC | 1696 |
| 4053 | CCUCGAAGCUGCUGUUCUC | 1228 | 4053 | CCUCGAAGCUGCUGUUCUC | 1228 | 4071 | GAGAACAGCAGCUUCGAGG | 1697 |
| 4071 | CUUGUCUGUCUGUCUCUGU | 1229 | 4071 | CUUGUCUGUCUGUCUCUGU | 1229 | 4089 | ACAGAGACAGACAGACAAG | 1698 |
| 4089 | UCUUGAAGCUCAGCCAAGA | 1230 | 4089 | UCUUGAAGCUCAGCCAAGA | 1230 | 4107 | UCUUGGCUGAGCUUCAAGA | 1699 |
| 4107 | AAACUUUCCCGUGUCACGC | 1231 | 4107 | AAACUUUCCCGUGUCACGC | 1231 | 4125 | GCGUGACACGGGAAAGUUU | 1700 |
| 4125 | CCUGCGUCCCACCGUGGGG | 1232 | 4125 | CCUGCGUCCCACCGUGGGG | 1232 | 4143 | CCCCACGGUGGGACGCAGG | 1701 |
| 4143 | GCUCUCUUGGAGCACCCAG | 1233 | 4143 | GCUCUCUUGGAGCACCCAG | 1233 | 4161 | CUGGGUGCUCCAAGAGAGC | 1702 |
| 4161 | GGGACACCCAGCGUGCAAC | 1234 | 4161 | GGGACACCCAGCGUGCAAC | 1234 | 4179 | GUUGCACGCUGGGUGUCCC | 1703 |
| 4179 | CAGCCACGGGAAGCCUUUC | 1235 | 4179 | CAGCCACGGGAAGCCUUUC | 1235 | 4197 | GAAAGGCUUCCCGUGGCUG | 1704 |
| 4197 | CUGCCGCCCAGGCCCACAG | 1236 | 4197 | CUGCCGCCCAGGCCCACAG | 1236 | 4215 | CUGUGGGCCUGGGCGGCAG | 1705 |
| 4215 | GGUCUCGAGACGCACAUGC | 1237 | 4215 | GGUCUCGAGACGCACAUGC | 1237 | 4233 | GCAUGUGCGUCUCGAGACC | 1706 |
| 4233 | CACGCCUGGGCGUGGCAGC | 1238 | 4233 | CACGCCUGGGCGUGGCAGC | 1238 | 4251 | GCUGCCACGCCCAGGCGUG | 1707 |
| 4251 | CCUCACAGGGAACACGGGA | 1239 | 4251 | CCUCACAGGGAACACGGGA | 1239 | 4269 | UCCCGUGUUCCCUGUGAGG | 1708 |
| 4269 | ACAGACGCCGGCGACGCGC | 1240 | 4269 | ACAGACGCCGGCGACGCGC | 1240 | 4287 | GCGCGUCGCCGGCGUCUGU | 1709 |
| 4287 | CAGACACACGGACACGCGG | 1241 | 4287 | CAGACACACGGACACGCGG | 1241 | 4305 | CCGCGUGUCCGUGUGUCUG | 1710 |
| 4305 | GAAGCCAAGCACACUCUGG | 1242 | 4305 | GAAGCCAAGCACACUCUGG | 1242 | 4323 | CCAGAGUGUGCUUGGCUUC | 1711 |
| 4323 | GCGGGUCCCGCAAGGGACG | 1243 | 4323 | GCGGGUCCCGCAAGGGACG | 1243 | 4341 | CGUCCCUUGCGGGACCCGC | 1712 |
| 4341 | GCCGUGGAAGAAAGGAGCC | 1244 | 4341 | GCCGUGGAAGAAAGGAGCC | 1244 | 4359 | GGCUCCUUUCUUCCACGGC | 1713 |
| 4359 | CUGUGGCAACAGGCGGCCG | 1245 | 4359 | CUGUGGCAACAGGCGGCCG | 1245 | 4377 | CGGCCGCCUGUUGCCACAG | 1714 |
| 4377 | GAGCUGCCGAAUUCAGUUG | 1246 | 4377 | GAGCUGCCGAAUUCAGUUG | 1246 | 4395 | CAACUGAAUUCGGCAGCUC | 1715 |
| 4395 | GACACGAGGCACAGAAAAC | 1247 | 4395 | GACACGAGGCACAGAAAAC | 1247 | 4413 | GUUUUCUGUGCCUCGUGUC | 1716 |
| 4413 | CAAAUAUCAAAGAUCUAAU | 1248 | 4413 | CAAAUAUCAAAGAUCUAAU | 1248 | 4431 | AUUAGAUCUUUGAUAUUUG | 1717 |
| 4431 | UAAUACAAAACAAACUUGA | 1249 | 4431 | UAAUACAAAACAAACUUGA | 1249 | 4449 | UCAAGUUUGUUUUGUAUUA | 1718 |
| 4449 | AUUAAAACUGGUGCUUAAA | 1250 | 4449 | AUUAAAACUGGUGCUUAAA | 1250 | 4467 | UUUAAGCACCAGUUUUAAU | 1719 |
| 4467 | AGUUUAUUACCCACAACUC | 1251 | 4467 | AGUUUAUUACCCACAACUC | 1251 | 4485 | GAGUUGUGGGUAAUAAACU | 1720 |
| 4485 | CCACAGUCUCUGUGUAAAC | 1252 | 4485 | CCACAGUCUCUGUGUAAAC | 1252 | 4503 | GUUUACACAGAGACUGUGG | 1721 |
| 4503 | CCACUCGACUCAUCUUGUA | 1253 | 4503 | CCACUCGACUCAUCUUGUA | 1253 | 4521 | UACAAGAUGAGUCGAGUGG | 1722 |
| 4521 | AGCUUAUUUUUUUUUUAAA | 1254 | 4521 | AGCUUAUUUUUUUUUUAAA | 1254 | 4539 | UUUAAAAAAAAAAUAAGCU | 1723 |
| 4539 | AGAGGACGUUUUCUACGGC | 1255 | 4539 | AGAGGACGUUUUCUACGGC | 1255 | 4557 | GCCGUAGAAAACGUCCUCU | 1724 |
| 4557 | CUGUGGCCCGCCUCUGUGA | 1256 | 4557 | CUGUGGCCCGCCUCUGUGA | 1256 | 4575 | UCACAGAGGCGGGCCACAG | 1725 |
| 4575 | AACCAUAGCGGUGUGCGGC | 1257 | 4575 | AACCAUAGCGGUGUGCGGC | 1257 | 4593 | GCCGCACACCGCUAUGGUU | 1726 |
| 4593 | CGGGGGGUCUGCACCCGGG | 1258 | 4593 | CGGGGGGUCUGCACCCGGG | 1258 | 4611 | CCCGGGUGCAGACCCCCCG | 1727 |
| 4611 | GUGGGGGACAGAGGGACCU | 1259 | 4611 | GUGGGGGACAGAGGGACCU | 1259 | 4629 | AGGUCCCUCUGUCCCCCAC | 1728 |
| 4629 | UUUAAAGAAAACAAAACUG | 1260 | 4629 | UUUAAAGAAAACAAAACUG | 1260 | 4647 | CAGUUUUGUUUUCUUUAAA | 1729 |
| 4647 | GGACAGAAACAGGAAUGUG | 1261 | 4647 | GGACAGAAACAGGAAUGUG | 1261 | 4665 | CACAUUCCUGUUUCUGUCC | 1730 |
| 4665 | GAGCUGGGGGAGCUGGCUU | 1262 | 4665 | GAGCUGGGGGAGCUGGCUU | 1262 | 4683 | AAGCCAGCUCCCCCAGCUC | 1731 |
| 4683 | UGAGUUUCUCAAAAGCCAU | 1263 | 4683 | UGAGUUUCUCAAAAGCCAU | 1263 | 4701 | AUGGCUUUUGAGAAACUCA | 1732 |
| 4701 | UCGGAAGAUGCGAGUUUGU | 1264 | 4701 | UCGGAAGAUGCGAGUUUGU | 1264 | 4719 | ACAAACUCGCAUCUUCCGA | 1733 |
| 4719 | UGCCUUUUUUUUUAUUGCU | 1265 | 4719 | UGCCUUUUUUUUUAUUGCU | 1265 | 4737 | AGCAAUAAAAAAAAAGGCA | 1734 |
| 4737 | UCUGGUGGAUUUUUGUGGC | 1266 | 4737 | UCUGGUGGAUUUUUGUGGC | 1266 | 4755 | GCCACAAAAAUCCACCAGA | 1735 |
| 4755 | CUGGGUUUUCUGAAGUCUG | 1267 | 4755 | CUGGGUUUUCUGAAGUCUG | 1267 | 4773 | CAGACUUCAGAAAACCCAG | 1736 |
| 4773 | GAGGAACAAUGCCUUAAGA | 1268 | 4773 | GAGGAACAAUGCCUUAAGA | 1268 | 4791 | UCUUAAGGCAUUGUUCCUC | 1737 |
| 4791 | AAAAAACAAACAGCAGGAA | 1269 | 4791 | AAAAAACAAACAGCAGGAA | 1269 | 4809 | UUCCUGCUGUUUGUUUUUU | 1738 |
| 4809 | AUCGGUGGGACAGUUUCCU | 1270 | 4809 | AUCGGUGGGACAGUUUCCU | 1270 | 4827 | AGGAAACUGUCCCACCGAU | 1739 |
| 4827 | UGUGGCCAGCCGAGCCUGG | 1271 | 4827 | UGUGGCCAGCCGAGCCUGG | 1271 | 4845 | CCAGGCUCGGCUGGCCACA | 1740 |
| 4845 | GCAGUGCUGGCACCGCGAG | 1272 | 4845 | GCAGUGCUGGCACCGCGAG | 1272 | 4863 | CUCGCGGUGCCAGCACUGC | 1741 |
| 4863 | GCUGGCCUGACGCCUCAAG | 1273 | 4863 | GCUGGCCUGACGCCUCAAG | 1273 | 4881 | CUUGAGGCGUCAGGCCAGC | 1742 |
| 4881 | GCACGGGCACCAGCCGUCA | 1274 | 4881 | GGACGGGCACCAGCCGUCA | 1274 | 4899 | UGACGGCUGGUGCCCGUGC | 1743 |
| 4899 | AUCUCCGGGGCCAGGGGCU | 1275 | 4899 | AUCUCCGGGGCCAGGGGCU | 1275 | 4917 | AGCCCCUGGCCCCGGAGAU | 1744 |
| 4917 | UGCAGCCCGGCGGUCCCUG | 1276 | 4917 | UGCAGCCCGGCGGUCCCUG | 1276 | 4935 | CAGGGACCGCCGGGCUGCA | 1745 |
| 4935 | GUUUUGCUUUAUUGCUGUU | 1277 | 4935 | GUUUUGCUUUAUUGCUGUU | 1277 | 4953 | AACAGCAAUAAAGCAAAAC | 1746 |
| 4953 | UUAAGAAAAAUGGAGGUAG | 1278 | 4953 | UUAAGAAAAAUGGAGGUAG | 1278 | 4971 | CUACCUCCAUUUUUCUUAA | 1747 |
| 4971 | GUUCCAAAAAAGUGGCAAA | 1279 | 4971 | GUUCCAAAAAAGUGGCAAA | 1279 | 4989 | UUUGCCACUUUUUUGGAAC | 1748 |
| 4989 | AUCCCGUUGGAGGUUUUGA | 1280 | 4989 | AUCCCGUUGGAGGUUUUGA | 1280 | 5007 | UCAAAACCUCCAACGGGAU | 1749 |
| 5007 | AAGUCCAACAAAUUUUAAA | 1281 | 5007 | AAGUCCAACAAAUUUUAAA | 1281 | 5025 | UUUAAAAUUUGUUGGACUU | 1750 |
| 5025 | ACGAAUCCAAAGUGUUCUC | 1282 | 5025 | ACGAAUCCAAAGUGUUCUC | 1282 | 5043 | GAGAACACUUUGGAUUCGU | 1751 |
| 5043 | CACAGGUCACAUACGAUUG | 1283 | 5043 | CACACGUCACAUACGAUUG | 1283 | 5061 | CAAUCGUAUGUGACGUGUG | 1752 |
| 5061 | GAGCAUCUCCAUCUGGUCG | 1284 | 5061 | GAGCAUCUCCAUCUGGUCG | 1284 | 5079 | CGACCAGAUGGAGAUGCUC | 1753 |
| 5079 | GUGAAGCAUGUGGUAGGCA | 1285 | 5079 | GUGAAGCAUGUGGUAGGCA | 1285 | 5097 | UGCCUACCACAUGCUUCAC | 1754 |
| 5097 | ACACUUGCAGUGUUACGAU | 1286 | 5097 | ACACUUGCAGUGUUACGAU | 1286 | 5115 | AUCGUAACACUGCAAGUGU | 1755 |
| 5115 | UCGGAAUGCUUUUUAUUAA | 1287 | 5115 | UCGGAAUGCUUUUUAUUAA | 1287 | 5133 | UUAAUAAAAAGCAUUCCGA | 1756 |
| 5133 | AAAGCAAGUAGCAUGAAGU | 1288 | 5133 | AAAGCAAGUAGCAUGAAGU | 1288 | 5151 | ACUUCAUGCUACUUGCUUU | 1757 |
| 5151 | UAUUGCUUAAAUUUUAGGU | 1289 | 5151 | UAUUGCUUAAAUUUUAGGU | 1289 | 5169 | ACCUAAAAUUUAAGCAAUA | 1758 |
| 5169 | UAUAAAUAAAUAUAUAUAU | 1290 | 5169 | UAUAAAUAAAUAUAUAUAU | 1290 | 5187 | AUAUAUAUAUUUAUUUAUA | 1759 |
| 5187 | UGUAUAAUAUAUAUUCCAA | 1291 | 5187 | UGUAUAAUAUAUAUUCCAA | 1291 | 5205 | UUGGAAUAUAUAUUAUACA | 1760 |
| 5205 | AUGUAUUCCAAGCUAAGAA | 1292 | 5205 | AUGUAUUCCAAGCUAAGAA | 1292 | 5223 | UUCUUAGCUUGGAAUACAU | 1761 |
| 5223 | AACUUACUUGAUUCUUAUG | 1293 | 5223 | AACUUACUUGAUUCUUAUG | 1293 | 5241 | CAUAAGAAUCAAGUAAGUU | 1762 |
| 5241 | GAAAUCUUGAUAAAAUAUU | 1294 | 5241 | GAAAUCUUGAUAAAAUAUU | 1294 | 5259 | AAUAUUUUAUCAAGAUUUC | 1763 |
| 5259 | UUAUAAUGCAUUUAUAGAA | 1295 | 5259 | UUAUAAUGCAUUUAUAGAA | 1295 | 5277 | UUCUAUAAAUGCAUUAUAA | 1764 |
| 5277 | AAAAGUAUAUAUAUAUAUA | 1296 | 5277 | AAAAGUAUAUAUAUAUAUA | 1296 | 5295 | UAUAUAUAUAUAUACUUUU | 1765 |
| 5295 | AUAAAAUGAAUGCAGAUUG | 1297 | 5295 | AUAAAAUGAAUGCAGAUUG | 1297 | 5313 | CAAUCUGCAUUCAUUUUAU | 1766 |
| 5313 | GCGAAGGUCCCUGCAAAUG | 1298 | 5313 | GCGAAGGUCCCUGCAAAUG | 1298 | 5331 | CAUUUGCAGGGACCUUCGC | 1767 |
| 5331 | GGAUGGCUUGUGAAUUUGC | 1299 | 5331 | GGAUGGCUUGUGAAUUUGC | 1299 | 5349 | GCAAAUUCACAAGCCAUCC | 1768 |
| 5349 | CUCUCAAGGUGCUUAUGGA | 1300 | 5349 | CUCUCAAGGUGCUUAUGGA | 1300 | 5367 | UCCAUAAGCACCUUGAGAG | 1769 |
| 5367 | AAAGGGAUCCUGAUUGAUU | 1301 | 5367 | AAAGGGAUCCUGAUUGAUU | 1301 | 5385 | AAUCAAUCAGGAUCCCUUU | 1770 |
| 5385 | UGAAAUUCAUGUUUUCUCA | 1302 | 5385 | UGAAAUUCAUGUUUUCUCA | 1302 | 5403 | UGAGAAAACAUGAAUUUCA | 1771 |
| 5403 | AAGCUCCAGAUUGGCUAGA | 1303 | 5403 | AAGCUCCAGAUUGGCUAGA | 1303 | 5421 | UCUAGCCAAUCUGGAGCUU | 1772 |
| 5421 | AUUUCAGAUCGCCAACACA | 1304 | 5421 | AUUUCAGAUCGCCAACACA | 1304 | 5439 | UGUGUUGGCGAUCUGAAAU | 1773 |
| 5439 | AUUCGCCACUGGGCAACUA | 1305 | 5439 | AUUCGCCACUGGGCAACUA | 1305 | 5457 | UAGUUGCCCAGUGGCGAAU | 1774 |
| 5457 | ACCCUACAAGUUUGUACUU | 1306 | 5457 | ACCCUACAAGUUUGUACUU | 1306 | 5475 | AAGUACAAACUUGUAGGGU | 1775 |
| 5475 | UUCAUUUUAAUUAUUUUCU | 1307 | 5475 | UUCAUUUUAAUUAUUUUCU | 1307 | 5493 | AGAAAAUAAUUAAAAUGAA | 1776 |
| 5493 | UAACAGAACCGCUCCCGUC | 1308 | 5493 | UAACAGAACCGCUCCCGUC | 1308 | 5511 | GACGGGAGCGGUUCUGUUA | 1777 |
| 5511 | CUCCAAGCCUUCAUGCACA | 1309 | 5511 | CUCCAAGCCUUCAUGCACA | 1309 | 5529 | UGUGCAUGAAGGCUUGGAG | 1778 |
| 5529 | AUAUGUACCUAAUGAGUUU | 1310 | 5529 | AUAUGUACCUAAUGAGUUU | 1310 | 5547 | AAACUCAUUAGGUACAUAU | 1779 |
| 5547 | UUUAUAGCAAAGAAUAUAA | 1311 | 5547 | UUUAUAGCAAAGAAUAUAA | 1311 | 5565 | UUAUAUUCUUUGCUAUAAA | 1780 |
| 5565 | AAUUUGCUGUUGAUUUUUG | 1312 | 5565 | AAUUUGCUGUUGAUUUUUG | 1312 | 5583 | CAAAAAUCAACAGCAAAUU | 1781 |
| 5583 | GUAUGAAUUUUUUCACAAA | 1313 | 5583 | GUAUGAAUUUUUUCACAAA | 1313 | 5601 | UUUGUGAAAAAAUUCAUAC | 1782 |
| 5601 | AAAGAUCCUGAAUAAGCAU | 1314 | 5601 | AAAGAUCCUGAAUAAGCAU | 1314 | 5619 | AUGCUUAUUCAGGAUCUUU | 1783 |
| 5619 | UUGUUUUAUGAAUUUUACA | 1315 | 5619 | UUGUUUUAUGAAUUUUACA | 1315 | 5637 | UGUAAAAUUCAUAAAACAA | 1784 |
| 5637 | AUUUUUCCUCACCAUUUAG | 1316 | 5637 | AUUUUUCCUCACCAUUUAG | 1316 | 5655 | CUAAAUGGUGAGGAAAAAU | 1785 |
| 5655 | GCAAUUUUCUGAAUGGUAA | 1317 | 5655 | GCAAUUUUCUGAAUGGUAA | 1317 | 5673 | UUACCAUUCAGAAAAUUGC | 1786 |
| 5673 | AUAAUGUCUAAAUCUUUUU | 1318 | 5673 | AUAAUGUCUAAAUCUUUUU | 1318 | 5691 | AAAAAGAUUUAGACAUUAU | 1787 |
| 5691 | UCCUUUCUGAAUUCUUGCU | 1319 | 5691 | UCCUUUCUGAAUUCUUGCU | 1319 | 5709 | AGCAAGAAUUCAGAAAGGA | 1788 |
| 5709 | UUGUACAUUUUUUUUUACC | 1320 | 5709 | UUGUACAUUUUUUUUUACC | 1320 | 5727 | GGUAAAAAAAAAUGUACAA | 1789 |
| 5727 | CUUUCAAAGGUUUUUAAUU | 1321 | 5727 | CUUUCAAAGGUUUUUAAUU | 1321 | 5745 | AAUUAAAAACCUUUGAAAG | 1790 |
| 5745 | UAUUUUUGUUUUUAUUUUU | 1322 | 5745 | UAUUUUUGUUUUUAUUUUU | 1322 | 5763 | AAAAAUAAAAACAAAAAUA | 1791 |
| 5763 | UGUACGAUGAGUUUUCUGC | 1323 | 5763 | UGUACGAUGAGUUUUCUGC | 1323 | 5781 | GCAGAAAACUCAUCGUACA | 1792 |
| 5781 | CAGCGUACAGAAUUGUUGC | 1324 | 5781 | CAGCGUACAGAAUUGUUGC | 1324 | 5799 | GCAACAAUUCUGUACGCUG | 1793 |
| 5799 | CUGUCAGAUUCUAUUUUCA | 1325 | 5799 | CUGUCAGAUUCUAUUUUCA | 1325 | 5817 | UGAAAAUAGAAUCUGACAG | 1794 |
| 5817 | AGAAAGUGAGAGGAGGGAC | 1326 | 5817 | AGAAAGUGAGAGGAGGGAC | 1326 | 5835 | GUCCCUCCUCUCACUUUCU | 1795 |
| 5835 | CCGUAGGUCUUUUCGGAGU | 1327 | 5835 | CCGUAGGUCUUUUCGGAGU | 1327 | 5853 | ACUCCGAAAAGACCUACGG | 1796 |
| 5853 | UGACACCAACGAUUGUGUC | 1328 | 5853 | UGACACCAACGAUUGUGUC | 1328 | 5871 | GACACAAUCGUUGGUGUCA | 1797 |
| 5871 | CUUUCCUGGUCUGUCCUAG | 1329 | 5871 | CUUUCCUGGUCUGUCCUAG | 1329 | 5889 | CUAGGACAGACCAGGAAAG | 1798 |
| 5889 | GGAGCUGUAUAAAGAAGCC | 1330 | 5889 | GGAGCUGUAUAAAGAAGCC | 1330 | 5907 | GGCUUCUUUAUACAGCUCC | 1799 |
| 5907 | CCAGGGGCUCUUUUUAACU | 1331 | 5907 | CCAGGGGCUCUUUUUAACU | 1331 | 5925 | AGUUAAAAAGAGCCCCUGG | 1800 |
| 5925 | UUUCAACACUAGUAGUAUU | 1332 | 5925 | UUUCAACACUAGUAGUAUU | 1332 | 5943 | AAUACUACUAGUGUUGAAA | 1801 |
| 5943 | UACGAGGGGUGGUGUGUUU | 1333 | 5943 | UACGAGGGGUGGUGUGUUU | 1333 | 5961 | AAACACACCACCCCUCGUA | 1802 |
| 5961 | UUUCCCCUCCGUGGCAAGG | 1334 | 5961 | UUUCCCCUCCGUGGCAAGG | 1334 | 5979 | CCUUGCCACGGAGGGGAAA | 1803 |
| 5979 | GGCAGGGAGGGUUGCUUAG | 1335 | 5979 | GGCAGGGAGGGUUGCUUAG | 1335 | 5997 | CUAAGCAACCCUCCCUGCC | 1804 |
| 5997 | GGAUGCCCGGCCACCCUGG | 1336 | 5997 | GGAUGCCCGGCCACCCUGG | 1336 | 6015 | CCAGGGUGGCCGGGCAUCC | 1805 |
| 6015 | GGAGGCUUGCCAGAUGCCG | 1337 | 6015 | GGAGGCUUGCCAGAUGCCG | 1337 | 6033 | CGGCAUCUGGCAAGCCUCC | 1806 |
| 6033 | GGGGGCAGUCAGCAUUAAU | 1338 | 6033 | GGGGGCAGUCAGCAUUAAU | 1338 | 6051 | AUUAAUGCUGACUGCCCCC | 1807 |
| 6051 | UGAAACUCAUGUUUAAACU | 1339 | 6051 | UGAAACUCAUGUUUAAACU | 1339 | 6069 | AGUUUAAACAUGAGUUUCA | 1808 |
| 6069 | UUCUCUGACCACAUCGUCA | 1340 | 6069 | UUCUCUGACCACAUCGUCA | 1340 | 6087 | UGACGAUGUGGUCAGAGAA | 1809 |
| 6O87 | AGGAUAGAAUUCUAACUUG | 1341 | 6087 | AGGAUAGAAUUCUAACUUG | 1341 | 6105 | CAAGUUAGAAUUCUAUCCU | 1810 |
| 6105 | GAGUUUUCCAAAGACCUUU | 1342 | 6105 | GAGUUUUCCAAAGACCUUU | 1342 | 6123 | AAAGGUCUUUGGAAAACUC | 1811 |
| 6123 | UUGAGCAUGUCAGCAAUGC | 1343 | 6123 | UUGAGCAUGUCAGCAAUGC | 1343 | 6141 | GCAUUGCUGACAUGCUCAA | 1812 |
| 6141 | CAUGGGGCACACGUGGGGC | 1344 | 6141 | CAUGGGGCACACGUGGGGC | 1344 | 6159 | GCCCCACGUGUGCCCCAUG | 1813 |
| 6159 | CUCUUUACCCACUUGGGUU | 1345 | 6159 | CUCUUUACCCACUUGGGUU | 1345 | 6177 | AACCCAAGUGGGUAAAGAG | 1814 |
| 6177 | UUUUCCACUGCAGCCACGU | 1346 | 6177 | UUUUCCACUGCAGCCACGU | 1346 | 6195 | ACGUGGCUGCAGUGGAAAA | 1815 |
| 6195 | UGGCCAGCCCUGGAUUUUG | 1347 | 6195 | UGGCCAGCCCUGGAUUUUG | 1347 | 6213 | CAAAAUCCAGGGCUGGCCA | 1816 |
| 6213 | GGAGCCUGUGGCUGCAAGG | 1348 | 6213 | GGAGCCUGUGGCUGCAAGG | 1348 | 6231 | CCUUGCAGCCACAGGCUCC | 1817 |
| 6231 | GAACCCAGGGACCCUUGUU | 1349 | 6231 | GAACCCAGGGACCCUUGUU | 1349 | 6249 | AACAAGGGUCCCUGGGUUC | 1818 |
| 6249 | UGCCUGGUGAACCUGCAGG | 1350 | 6249 | UGCCUGGUGAACCUGCAGG | 1350 | 6267 | CCUGCAGGUUCACCAGGCA | 1819 |
| 6267 | GGAGGGUAUGAUUGCCUGA | 1351 | 6267 | GGAGGGUAUGAUUGCCUGA | 1351 | 6285 | UCAGGCAAUCAUACCCUCC | 1820 |
| 6285 | ACCAGGACAGCCAGUCUUU | 1352 | 6285 | ACCAGGACAGCCAGUCUUU | 1352 | 6303 | AAAGACUGGCUGUCCUGGU | 1821 |
| 6303 | UACUCUUUUUCUCUUCAAC | 1353 | 6303 | UACUCUUUUUCUCUUCAAC | 1353 | 6321 | GUUGAAGAGAAAAAGAGUA | 1822 |
| 6321 | CAGUAACUGACAGUCACGU | 1354 | 6321 | CAGUAACUGACAGUCACGU | 1354 | 6339 | ACGUGACUGUCAGUUACUG | 1823 |
| 6339 | UUUUACUGGUAACUUAUUU | 1355 | 6339 | UUUUACUGGUAACUUAUUU | 1355 | 6357 | AAAUAAGUUACCAGUAAAA | 1824 |
| 6357 | UUCCAGCACAUGAAGCCAC | 1356 | 6357 | UUCCAGCACAUGAAGCCAC | 1356 | 6375 | GUGGCUUCAUGUGCUGGAA | 1825 |
| 6375 | CCAGUUUCAUUCCAAAGUG | 1357 | 6375 | CCAGUUUCAUUCCAAAGUG | 1357 | 6393 | CACUUUGGAAUGAAACUGG | 1826 |
| 6393 | GUAUAUUGGGUUCAGACUU | 1358 | 6393 | GUAUAUUGGGUUCAGACUU | 1358 | 6411 | AAGUCUGAACCCAAUAUAC | 1827 |
| 6411 | UGGGGGCAGAAGUUCAGAC | 1359 | 6411 | UGGGGGCAGAAGUUCAGAC | 1359 | 6429 | GUCUGAACUUCUGCCCCCA | 1828 |
| 6429 | CACACCGUGCUCAGGAGGG | 1360 | 6429 | CACACCGUGCUCAGGAGGG | 1360 | 6447 | CCCUCCUGAGCACGGUGUG | 1829 |
| 6447 | GACCCAGAGCCGAGUUUCG | 1361 | 6447 | GACCCAGAGCCGAGUUUCG | 1361 | 6465 | CGAAACUCGGCUCUGGGUC | 1830 |
| 6465 | GGAGUUUGGUAAAGUUUAC | 1362 | 6465 | GGAGUUUGGUAAAGUUUAC | 1362 | 6483 | GUAAACUUUACCAAACUCC | 1831 |
| 6483 | CAGGGUAGCUUCUGAAAUU | 1363 | 6483 | CAGGGUAGCUUCUGAAAUU | 1363 | 6501 | AAUUUCAGAAGCUACCCUG | 1832 |
| 6501 | UAACUCAAACUUUUGACCA | 1364 | 6501 | UAACUCAAACUUUUGACCA | 1364 | 6519 | UGGUCAAAAGUUUGAGUUA | 1833 |
| 6519 | AAAUGAGUGCAGAUUCUUG | 1365 | 6519 | AAAUGAGUGCAGAUUCUUG | 1365 | 6537 | CAAGAAUCUGCACUCAUUU | 1834 |
| 6537 | GGAUUCACUUGGUCACUGG | 1366 | 6537 | GGAUUCACUUGGUCACUGG | 1366 | 6555 | CCAGUGACCAAGUGAAUCC | 1835 |
| 6555 | GGCUGCUGAUGGUCAGCUC | 1367 | 6555 | GGCUGCUGAUGGUCAGCUC | 1367 | 6573 | GAGCUGACCAUCAGCAGCC | 1836 |
| 6573 | CUGAGACAGUGGUUUGAGA | 1368 | 6573 | CUGAGACAGUGGUUUGAGA | 1368 | 6591 | UCUCAAACCACUGUCUCAG | 1837 |
| 6591 | AGCAGGCAGAACGGUCUUG | 1369 | 6591 | AGCAGGCAGAACGGUCUUG | 1369 | 6609 | CAAGACCGUUCUGCCUGCU | 1838 |
| 6609 | GGGACUUGUUUGACUUUCC | 1370 | 6609 | GGGACUUGUUUGACUUUCC | 1370 | 6627 | GGAAAGUCAAACAAGUCCC | 1839 |
| 6627 | CCCUCCCUGGUGGCCACUC | 1371 | 6627 | CCCUCCCUGGUGGCCACUC | 1371 | 6645 | GAGUGGCCACCAGGGAGGG | 1840 |
| 6645 | CUUUGCUCUGAAGCCCAGA | 1372 | 6645 | CUUUGCUCUGAAGCCCAGA | 1372 | 6663 | UCUGGGCUUCAGAGCAAAG | 1841 |
| 6663 | AUUGGCAAGAGGAGCUGGU | 1373 | 6663 | AUUGGCAAGAGGAGCUGGU | 1373 | 6681 | ACCAGCUCCUCUUGCCAAU | 1842 |
| 6681 | UCCAUUCCCCAUUCAUGGC | 1374 | 6681 | UCCAUUCCCCAUUCAUGGC | 1374 | 6699 | GCCAUGAAUGGGGAAUGGA | 1843 |
| 6699 | CACAGAGCAGUGGCAGGGC | 1375 | 6699 | CACAGAGCAGUGGCAGGGC | 1375 | 6717 | GCCCUGCCACUGCUCUGUG | 1844 |
| 6717 | CCCAGCUAGCAGGCUCUUC | 1376 | 6717 | CCCAGCUAGCAGGCUCUUC | 1376 | 6735 | GAAGAGCCUGCUAGCUGGG | 1845 |
| 6735 | CUGGCCUCCUUGGCCUCAU | 1377 | 6735 | CUGGCCUCCUUGGCCUCAU | 1377 | 6753 | AUGAGGCCAAGGAGGCCAG | 1846 |
| 6753 | UUCUCUGCAUAGCCCUCUG | 1378 | 6753 | UUCUCUGCAUAGCCCUCUG | 1378 | 6771 | CAGAGGGCUAUGCAGAGAA | 1847 |
| 6771 | GGGGAUCCUGCCACCUGCC | 1379 | 6771 | GGGGAUCCUGCCACCUGCC | 1379 | 6789 | GGCAGGUGGCAGGAUCCCC | 1848 |
| 6789 | CCUCUUACCCCGCCGUGGC | 1380 | 6789 | CCUCUUACCCCGCCGUGGC | 1380 | 6807 | GCCACGGCGGGGUAAGAGG | 1849 |
| 6807 | CUUAUGGGGAGGAAUGCAU | 1381 | 6807 | CUUAUGGGGAGGAAUGGAU | 1381 | 6825 | AUGCAUUCCUCCCCAUAAG | 1850 |
| 6825 | UCAUCUCACUUUUUUUUUU | 1382 | 6825 | UCAUCUCACUUUUUUUUUU | 1382 | 6843 | AAAAAAAAAAGUGAGAUGA | 1851 |
| 6843 | UUAAGCAGAUGAUGGGAUA | 1383 | 6843 | UUAAGCAGAUGAUGGGAUA | 1383 | 6861 | UAUCCCAUCAUCUGCUUAA | 1852 |
| 6861 | AACAUGGACUGCUCAGUGG | 1384 | 6861 | AACAUGGACUGCUCAGUGG | 1384 | 6879 | CCACUGAGCAGUCCAUGUU | 1853 |
| 6879 | GCCAGGUUAUCAGUGGGGG | 1385 | 6879 | GCCAGGUUAUCAGUGGGGG | 1385 | 6897 | CCCCCACUGAUAACCUGGC | 1854 |
| 6897 | GGACUUAAUUCUAAUCUCA | 1386 | 6897 | GGACUUAAUUCUAAUCUCA | 1386 | 6915 | UGAGAUUAGAAUUAAGUCC | 1855 |
| 6915 | AUUCAAAUGGAGACGCCCU | 1387 | 6915 | AUUCAAAUGGAGACGCCCU | 1387 | 6933 | AGGGCGUCUCCAUUUGAAU | 1856 |
| 6933 | UCUGCAAAGGCCUGGCAGG | 1388 | 6933 | UCUGCAAAGGCCUGGCAGG | 1388 | 6951 | CCUGCCAGGCCUUUGCAGA | 1857 |
| 6951 | GGGGAGGCACGUUUCAUCU | 1389 | 6951 | GGGGAGGCACGUUUCAUCU | 1389 | 6969 | AGAUGAAACGUGCCUCCCC | 1858 |
| 6969 | UGUCAGCUCACUCCAGGUU | 1390 | 6969 | UGUCAGCUCACUCCAGCUU | 1390 | 6987 | AAGCUGGAGUGAGCUGACA | 1859 |
| 6987 | UCACAAAUGUGCUGAGAGC | 1391 | 6987 | UCACAAAUGUGCUGAGAGC | 1391 | 7005 | GCUCUCAGCACAUUUGUGA | 1860 |
| 7005 | CAUUACUGUGUAGCCUUUU | 1392 | 7005 | CAUUACUGUGUAGCCUUUU | 1392 | 7023 | AAAAGGCUACACAGUAAUG | 1861 |
| 7023 | UCUUUGAAGACACACUCGG | 1393 | 7023 | UCUUUGAAGACACACUCGG | 1393 | 7041 | CCGAGUGUGUCUUCAAAGA | 1862 |
| 7041 | GCUCUUCUCCACAGCAAGC | 1394 | 7041 | GCUCUUCUCCACAGCAAGC | 1394 | 7059 | GCUUGCUGUGGAGAAGAGC | 1863 |
| 7059 | CGUCCAGGGCAGAUGGCAG | 1395 | 7059 | CGUCCAGGGCAGAUGGCAG | 1395 | 7077 | CUGCCAUCUGCCCUGGACG | 1864 |
| 7077 | GAGGAUCUGCCUCGGCGUC | 1396 | 7077 | GAGGAUCUGCCUCGGCGUC | 1396 | 7095 | GACGCCGAGGCAGAUCCUC | 1865 |
| 7095 | CUGCAGGCGGGACGACGUC | 1397 | 7095 | CUGCAGGCGGGACCACGUC | 1397 | 7113 | GACGUGGUCCCGCCUGCAG | 1866 |
| 7113 | CAGGGAGGGUUCCUUCAUG | 1398 | 7113 | CAGGGAGGGUUCCUUCAUG | 1398 | 7131 | CAUGAAGGAACCCUCCCUG | 1867 |
| 7131 | GUGUUCUCCCUGUGGGUCC | 1399 | 7131 | GUGUUCUCCCUGUGGGUCC | 1399 | 7149 | GGACCCACAGGGAGAACAC | 1868 |
| 7149 | CUUGGACCUUUAGCCUUUU | 1400 | 7149 | CUUGGACCUUUAGCCUUUU | 1400 | 7167 | AAAAGGCUAAAGGUCCAAG | 1869 |
| 7167 | UUCUUCCUUUGCAAAGGCC | 1401 | 7167 | UUCUUCCUUUGCAAAGGCC | 1401 | 7185 | GGCCUUUGCAAAGGAAGAA | 1870 |
| 7185 | CUUGGGGGCACUGGCUGGG | 1402 | 7185 | CUUGGGGGCACUGGCUGGG | 1402 | 7203 | CCCAGCCAGUGCCCCCAAG | 1871 |
| 7203 | GAGUCAGCAAGCGAGCACU | 1403 | 7203 | GAGUCAGCAAGCGAGCACU | 1403 | 7221 | AGUGCUCGCUUGCUGACUC | 1872 |
| 7221 | UUUAUAUCCCUUUGAGGGA | 1404 | 7221 | UUUAUAUCCCUUUGAGGGA | 1404 | 7239 | UCCCUCAAAGGGAUAUAAA | 1873 |
| 7239 | AAACCCUGAUGACGCCACU | 1405 | 7239 | AAACCCUGAUGACGCCACU | 1405 | 7257 | AGUGGCGUCAUCAGGGUUU | 1874 |
| 7257 | UGGGCCUCUUGGCGUCUGC | 1406 | 7257 | UGGGCCUCUUGGCGUCUGC | 1406 | 7275 | GCAGACGCCAAGAGGCCCA | 1875 |
| 7275 | CCCUGCCCUCGCGGCUUCC | 1407 | 7275 | CCCUGCCCUCGCGGCUUCC | 1407 | 7293 | GGAAGCCGCGAGGGCAGGG | 1876 |
| 7293 | CCGCCGUGCCGCAGCGUGC | 1408 | 7293 | CCGCCGUGCCGCAGCGUGC | 1408 | 7311 | GCACGCUGCGGCACGGCGG | 1877 |
| 7311 | CCCACGUGCCCACGCCCCA | 1409 | 7311 | CCCACGUGCCCACGCCCCA | 1409 | 7329 | UGGGGCGUGGGCACGUGGG | 1878 |
| 7329 | ACCAGCAGGCGGCUGUCCC | 1410 | 7329 | ACCAGCAGGCGGCUGUCCC | 1410 | 7347 | GGGACAGCCGCCUGCUGGU | 1879 |
| 7347 | CGGAGGCCGUGGCCCGCUG | 1411 | 7347 | CGGAGGCCGUGGCCCGCUG | 1411 | 7365 | CAGCGGGCCACGGCCUCCG | 1880 |
| 7365 | GGGACUGGCCGCCCCUCCC | 1412 | 7365 | GGGACUGGCCGCCCCUCCC | 1412 | 7383 | GGGAGGGGCGGCCAGUCCC | 1881 |
| 7383 | CCAGCGUCCCAGGGCUCUG | 1413 | 7383 | CCAGCGUCCCAGGGCUCUG | 1413 | 7401 | CAGAGCCCUGGGACGCUGG | 1882 |
| 7401 | GGUUCUGGAGGGCCACUUU | 1414 | 7401 | GGUUCUGGAGGGCCACUUU | 1414 | 7419 | AAAGUGGCCCUCCAGAACC | 1883 |
| 7419 | UGUCAAGGUGUUUCAGUUU | 1415 | 7419 | UGUCAAGGUGUUUCAGUUU | 1415 | 7437 | AAACUGAAACACCUUGACA | 1884 |
| 7437 | UUUCUUUACUUCUUUUGAA | 1416 | 7437 | UUUCUUUACUUCUUUUGAA | 1416 | 7455 | UUCAAAAGAAGUAAAGAAA | 1885 |
| 7455 | AAAUCUGUUUGCAAGGGGA | 1417 | 7455 | AAAUCUGUUUGCAAGGGGA | 1417 | 7473 | UCCCCUUGCAAACAGAUUU | 1886 |
| 7473 | AAGGACCAUUUCGUAAUGG | 1418 | 7473 | AAGGACCAUUUCGUAAUGG | 1418 | 7491 | CCAUUACGAAAUGGUCCUU | 1887 |
| 7491 | GUCUGACACAAAAGCAAGU | 1419 | 7491 | GUCUGACACAAAAGCAAGU | 1419 | 7509 | ACUUGCUUUUGUGUCAGAC | 1888 |
| 7509 | UUUGAUUUUUGCAGCACUA | 1420 | 7509 | UUUGAUUUUUGCAGCACUA | 1420 | 7527 | UAGUGCUGCAAAAAUCAAA | 1889 |
| 7527 | AGCAAUGGACUUUGUUGUU | 1421 | 7527 | AGCAAUGGACUUUGUUGUU | 1421 | 7545 | AACAACAAAGUCCAUUGCU | 1890 |
| 7545 | UUUUCUUUUUGAUCAGAAC | 1422 | 7545 | UUUUCUUUUUGAUCAGAAC | 1422 | 7563 | GUUCUGAUCAAAAAGAAAA | 1891 |
| 7563 | CAUUCCUUCUUUACUGGUC | 1423 | 7563 | CAUUCCUUCUUUACUGGUC | 1423 | 7581 | GACCAGUAAAGAAGGAAUG | 1892 |
| 7581 | CACAGCCACGUGCUCAUUC | 1424 | 7581 | CACAGCCACGUGCUCAUUC | 1424 | 7599 | GAAUGAGCACGUGGCUGUG | 1893 |
| 7599 | CCAUUCUUCUUUUUGUAGA | 1425 | 7599 | CCAUUCUUCUUUUUGUAGA | 1425 | 7617 | UCUACAAAAAGAAGAAUGG | 1894 |
| 7617 | ACUUUGGGCCCACGUGUUU | 1426 | 7617 | ACUUUGGGCCCACGUGUUU | 1426 | 7635 | AAACACGUGGGCCCAAAGU | 1895 |
| 7635 | UUAUGGGCAUUGAUACAUA | 1427 | 7635 | UUAUGGGCAUUGAUACAUA | 1427 | 7653 | UAUGUAUCAAUGCCCAUAA | 1896 |
| 7653 | AUAUAAAUAUAUAGAUAUA | 1428 | 7653 | AUAUAAAUAUAUAGAUAUA | 1428 | 7671 | UAUAUCUAUAUAUUUAUAU | 1897 |
| 7671 | AAAUAUAUAUGAAUAUAUU | 1429 | 7671 | AAAUAUAUAUGAAUAUAUU | 1429 | 7689 | AAUAUAUUCAUAUAUAUUU | 1898 |
| 7689 | UUUUUUAAGUUUCCUACAC | 1430 | 7689 | UUUUUUAAGUUUCCUACAC | 1430 | 7707 | GUGUAGGAAACUUAAAAAA | 1899 |
| 7707 | CCUGGAGGUUGCAUGGACU | 1431 | 7707 | CCUGGAGGUUGCAUGGACU | 1431 | 7725 | AGUCCAUGCAACCUCCAGG | 1900 |
| 7725 | UGUACGACCGGCAUGACUU | 1432 | 7725 | UGUACGACCGGCAUGACUU | 1432 | 7743 | AAGUCAUGCCGGUCGUACA | 1901 |
| 7743 | UUAUAUUGUAUACAGAUUU | 1433 | 7743 | UUAUAUUGUAUACAGAUUU | 1433 | 7761 | AAAUCUGUAUACAAUAUAA | 1902 |
| 7761 | UUGCACGCCAAACUCGGCA | 1434 | 7761 | UUGCACGCCAAACUCGGCA | 1434 | 7779 | UGCCGAGUUUGGCGUGCAA | 1903 |
| 7779 | AGCUUUGGGGAAGAAGAAA | 1435 | 7779 | AGCUUUGGGGAAGAAGAAA | 1435 | 7797 | UUUCUUCUUCCCCAAAGCU | 1904 |
| 7797 | AAAUGCCUUUCUGUUCCCC | 1436 | 7797 | AAAUGCCUUUCUGUUCCCC | 1436 | 7815 | GGGGAACAGAAAGGCAUUU | 1905 |
| 7815 | CUCUCAUGACAUUUGCAGA | 1437 | 7815 | CUCUCAUGACAUUUGCAGA | 1437 | 7833 | UCUGCAAAUGUCAUGAGAG | 1906 |
| 7833 | AUACAAAAGAUGGAAAUUU | 1438 | 7833 | AUACAAAAGAUGGAAAUUU | 1438 | 7851 | AAAUUUCCAUCUUUUGUAU | 1907 |
| 7851 | UUUCUGUAAAACAAAACCU | 1439 | 7851 | UUUCUGUAAAACAAAACCU | 1439 | 7869 | AGGUUUUGUUUUACAGAAA | 1908 |
| 7869 | UUGAAGGAGAGGAGGGCGG | 1440 | 7869 | UUGAAGGAGAGGAGGGCGG | 1440 | 7887 | CCGCCCUCCUCUCCUUCAA | 1909 |
| 7887 | GGGAAGUUUGCGUCUUAUU | 1441 | 7887 | GGGAAGUUUGCGUCUUAUU | 1441 | 7905 | AAUAAGACGCAAACUUCCC | 1910 |
| 7905 | UGAACUUAUUCUUAAGAAA | 1442 | 7905 | UGAACUUAUUCUUAAGAAA | 1442 | 7923 | UUUCUUAAGAAUAAGUUCA | 1911 |
| 7923 | AUUGUACUUUUUAUUGUAA | 1443 | 7923 | AUUGUACUUUUUAUUGUAA | 1443 | 7941 | UUACAAUAAAAAGUACAAU | 1912 |
| 7941 | AGAAAAAUAAAAAGGACUA | 1444 | 7941 | AGAAAAAUAAAAAGGACUA | 1444 | 7959 | UAGUCCUUUUUAUUUUUCU | 1913 |
| 7959 | ACUUAAACAUUUGUCAUAU | 1445 | 7959 | ACUUAAACAUUUGUCAUAU | 1445 | 7977 | AUAUGACAAAUGUUUAAGU | 1914 |
| 7977 | UUAAGAAAAAAAGUUUAUC | 1446 | 7977 | UUAAGAAAAAAAGUUUAUC | 1446 | 7995 | GAUAAACUUUUUUUCUUAA | 1915 |
| 7995 | CUAGCACUUGUGACAUACC | 1447 | 7995 | CUAGCACUUGUGACAUACC | 1447 | 8013 | GGUAUGUCACAAGUGCUAG | 1916 |
| 8013 | CAAUAAUAGAGUUUAUUGU | 1448 | 8013 | CAAUAAUAGAGUUUAUUGU | 1448 | 8031 | ACAAUAAACUCUAUUAUUG | 1917 |
| 8031 | UAUUUAUGUGGAAACAGUG | 1449 | 8031 | UAUUUAUGUGGAAACAGUG | 1449 | 8049 | CACUGUUUCCACAUAAAUA | 1918 |
| 8049 | GUUUUAGGGAAACUACUCA | 1450 | 8049 | GUUUUAGGGAAACUACUCA | 1450 | 8067 | UGAGUAGUUUCCCUAAAAC | 1919 |
| 8067 | AGAAUUCACAGUGAACUGC | 1451 | 8067 | AGAAUUCACAGUGAACUGC | 1451 | 8085 | GCAGUUCACUGUGAAUUCU | 1920 |
| 8085 | CCUGUCUCUCUCGAGUUGA | 1452 | 8085 | CCUGUCUCUCUCGAGUUGA | 1452 | 8103 | UCAACUCGAGAGAGACAGG | 1921 |
| 8103 | AUUUGGAGGAAUUUUGUUU | 1453 | 8103 | AUUUGGAGGAAUUUUGUUU | 1453 | 8121 | AAACAAAAUUCCUCCAAAU | 1922 |
| 8121 | UUGUUUUGUUUUGUUUGUU | 1454 | 8121 | UUGUUUUGUUUUGUUUGUU | 1454 | 8139 | AACAAACAAAACAAAACAA | 1923 |
| 8139 | UUCCUUUUAUCUCCUUCCA | 1455 | 8139 | UUCCUUUUAUCUCCUUCCA | 1455 | 8157 | UGGAAGGAGAUAAAAGGAA | 1924 |
| 8157 | ACGGGCCAGGCGAGCGCCG | 1456 | 8157 | ACGGGCCAGGCGAGCGCCG | 1456 | 8175 | CGGCGCUCGCCUGGCCCGU | 1925 |
| 8175 | GCCCGCCCUCACUGGCCUU | 1457 | 8175 | GCCCGCCCUCACUGGCCUU | 1457 | 8193 | AAGGCCAGUGAGGGCGGGC | 1926 |
| 8193 | UGUGACGGUUUAUUCUGAU | 1458 | 8193 | UGUGACGGUUUAUUCUGAU | 1458 | 8211 | AUCAGAAUAAACCGUCACA | 1927 |
| 8211 | UUGAGAACUGGGCGGACUC | 1459 | 8211 | UUGAGAACUGGGCGGACUC | 1459 | 8229 | GAGUCCGCCCAGUUCUCAA | 1928 |
| 8229 | CGAAAGAGUCCCCUUUUCC | 1460 | 8229 | CGAAAGAGUCCCCUUUUCC | 1460 | 8247 | GGAAAAGGGGACUCUUUCG | 1929 |
| 8247 | CGCACAGCUGUGUUGACUU | 1461 | 8247 | CGCACAGCUGUGUUGACUU | 1461 | 8265 | AAGUCAACACAGCUGUGCG | 1930 |
| 8265 | UUUUAAUUACUUUUAGGUG | 1462 | 8265 | UUUUAAUUACUUUUAGGUG | 1462 | 8283 | CACCUAAAAGUAAUUAAAA | 1931 |
| 8283 | GAUGUAUGGCUAAGAUUUC | 1463 | 8283 | GAUGUAUGGCUAAGAUUUC | 1463 | 8301 | GAAAUCUUAGCCAUACAUC | 1932 |
| 8301 | CACUUUAAGCAGUCGUGAA | 1464 | 8301 | CACUUUAAGCAGUCGUGAA | 1464 | 8319 | UUCACGACUGCUUAAAGUG | 1933 |
| 8319 | ACUGUGCGAGCACUGUGGU | 1465 | 8319 | ACUGUGCGAGCACUGUGGU | 1465 | 8337 | ACCACAGUGCUCGCACAGU | 1934 |
| 8337 | UUUACAAUUAUACUUUGCA | 1466 | 8337 | UUUACAAUUAUACUUUGCA | 1466 | 8355 | UGCAAAGUAUAAUUGUAAA | 1935 |
| 8355 | AUCGAAAGGAAACCAUUUC | 1467 | 8355 | AUCGAAAGGAAACCAUUUC | 1467 | 8373 | GAAAUGGUUUCCUUUCGAU | 1936 |
| 8373 | CUUCAUUGUAACGAAGCUG | 1468 | 8373 | CUUCAUUGUAACGAAGCUG | 1468 | 8391 | CAGCUUCGUUACAAUGAAG | 1937 |
| 8391 | GAGCGUGUUCUUAGCUCGG | 1469 | 8391 | GAGCGUGUUCUUAGCUCGG | 1469 | 8409 | CCGAGCUAAGAACACGCUC | 1938 |
| 8409 | GCCUCACUUUGUCUCUGGC | 1470 | 8409 | GCCUCACUUUGUCUCUGGC | 1470 | 8427 | GCCAGAGACAAAGUGAGGC | 1939 |
| 8427 | CAUUGAUUAAAAGUCUGCU | 1471 | 8427 | CAUUGAUUAAAAGUCUGCU | 1471 | 8445 | AGCAGACUUUUAAUCAAUG | 1940 |

HDAC5 variant 1: NM_005474.4

| | | | | | | | | |
|---|---|---|---|---|---|---|---|---|
| 3 | AAUGUUGUUGUUGGUGGCG | 2053 | 3 | AAUGUUGUUGUUGGUGGCG | 2053 | 21 | CGCCACCAACAACAACAUU | 2348 |
| 21 | GGCGGCGAGCGGAGCCGGA | 2054 | 21 | GGCGGCGAGCGGAGCCGGA | 2054 | 39 | UCCGGCUCCGCUCGCCGCC | 2349 |
| 39 | AGGAGCCGCCGCAAAGAUG | 2055 | 39 | AGGAGCCGCCGCAAAGAUG | 2055 | 57 | CAUCUUUGCGGCGGCUCCU | 2350 |
| 57 | GGAGGAGCCGUCGAGGAGG | 2056 | 57 | GGAGGAGCCGUCGAGGAGG | 2056 | 75 | CCUCCUCGACGGCUCCUCC | 2351 |
| 75 | GUGCUGCCGCCGCUGCCGC | 2057 | 75 | GUGCUGCCGCCGCUGCCGC | 2057 | 93 | GCGGCAGCGGCGGCAGCAC | 2352 |
| 93 | CCGCCGCUGCUGCCGCCGC | 2058 | 93 | CCGCCGCUGGUGCCGCCGC | 2058 | 111 | GGGGCGGCAGCAGCGGCGG | 2353 |
| 111 | GCGCCCGGGAAGCCGGAGC | 2059 | 111 | CCGCCCGCGAAGCCGGAGC | 2059 | 129 | GCUCCGGCUUCGCGGGCGG | 2354 |
| 129 | CUCGAGCCGCAGCGGGGAU | 2060 | 129 | CUCGAGCCGCAGCGGGGAU | 2060 | 147 | AUCCCCGCUGCGGCUCGAG | 2355 |
| 147 | UGCCGUUCUGAGUGCCUGA | 2061 | 147 | UGCCGUUCUGAGUGCCUGA | 2061 | 165 | UCAGGCACUCAGAACGGCA | 2356 |
| 165 | ACUGCCUCGCCCCGAAGGA | 2062 | 165 | ACUGCCUCGCCCCGAAGGA | 2062 | 183 | UCCUUCGGGGCGAGGCAGU | 2357 |
| 183 | AUGGCCUCGGAUGGGCAUU | 2063 | 183 | AUGGCCUCGGAUGGGCAUU | 2063 | 201 | AAUGCCCAUCCGAGGCCAU | 2358 |
| 201 | UAGAGGCACGGCGGCCCCG | 2064 | 201 | UAGAGGCACGGCGGCCCCG | 2064 | 219 | CGGGGCCGCCGUGCCUCUA | 2359 |
| 219 | GGGCUCCCGUCCCGUCCGU | 2065 | 219 | GGGCUCCCGUCCCGUCCGU | 2065 | 237 | ACGGACGGGACGGGAGCCC | 2360 |
| 237 | UCUGUCUGUUAUCGUCUGU | 2066 | 237 | UCUGUCUGUUAUCGUCUGU | 2066 | 255 | ACAGACGAUAACAGACAGA | 2361 |
| 255 | UCUCUCUUGACAUCACCGC | 2067 | 255 | UCUCUCUUGACAUCACCGC | 2067 | 273 | GCGGUGAUGUCAAGAGAGA | 2362 |
| 273 | CAGCUCCACCCCCUCCCGU | 2068 | 273 | CAGCUCCACCCCCUCCCGU | 2068 | 291 | ACGGGAGGGGGUGGAGCUG | 2363 |
| 291 | UCCCAGCCCCCAACGCCAG | 2069 | 291 | UCCCAGCCCCCAACGCCAG | 2069 | 309 | CUGGCGUUGGGGGCUGGGA | 2364 |
| 309 | GCUUCCUGCAGGCCCAGAG | 2070 | 309 | GCUUCCUGCAGGCCCAGAG | 2070 | 327 | CUCUGGGCCUGCAGGAAGC | 2365 |
| 327 | GCCGGCAUGAACUCUCCCA | 2071 | 327 | GCCGGCAUGAACUCUCCCA | 2071 | 345 | UGGGAGAGUUCAUGCCGGC | 2366 |
| 345 | AACGAGUCGGAUGGGAUGU | 2072 | 345 | AACGAGUCGGAUGGGAUGU | 2072 | 363 | ACAUCCCAUCCGACUCGUU | 2367 |
| 363 | UCAGGUCGGGAACCAUCCU | 2073 | 363 | UCAGGUCGGGAACCAUCCU | 2073 | 381 | AGGAUGGUUCCCGACCUGA | 2368 |
| 381 | UUGGAAAUCCUGCCGCGGA | 2074 | 381 | UUGGAAAUCCUGCCGCGGA | 2074 | 399 | UCCGCGGCAGGAUUUCCAA | 2369 |
| 399 | ACUUCUCUGCACAGCAUCC | 2075 | 399 | ACUUCUCUGCACAGGAUCC | 2075 | 417 | GGAUGCUGUGCAGAGAAGU | 2370 |
| 417 | CCUGUGACAGUGGAGGUGA | 2076 | 417 | CCUGUGACAGUGGAGGUGA | 2076 | 435 | UCACCUCCACUGUCACAGG | 2371 |
| 435 | AAGCCGGUGCUGCCAAGAG | 2077 | 435 | AAGCCGGUGCUGCCAAGAG | 2077 | 453 | CUCUUGGCAGCACCGGCUU | 2372 |
| 453 | GCCAUGCCCAGUUCCAUGG | 2078 | 453 | GCCAUGCCCAGUUCCAUGG | 2078 | 471 | CCAUGGAACUGGGCAUGGC | 2373 |
| 471 | GGGGGUGGGGGUGGAGGCA | 2079 | 471 | GGGGGUGGGGGUGGAGGCA | 2079 | 489 | UGCCUCCACCCCCACCCCC | 2374 |
| 489 | AGCCCCAGCCCUGUGGAGC | 2080 | 489 | AGCCCCAGCCCUGUGGAGC | 2080 | 507 | GCUCCACAGGGCUGGGGCU | 2375 |
| 507 | CUACGGGGGGCUCUGGUGG | 2081 | 507 | CUACGGGGGGCUCUGGUGG | 2081 | 525 | CCACCAGAGCCCCCCGUAG | 2376 |
| 525 | GGCUCUGUGGACCCCACAC | 2082 | 525 | GGCUCUGUGGACCCCACAC | 2082 | 543 | GUGUGGGGUCCACAGAGCC | 2377 |
| 543 | CUGCGGGAGCAGCAACUGC | 2083 | 543 | CUGCGGGAGCAGCAACUGC | 2083 | 561 | GCAGUUGCUGCUCCCGCAG | 2378 |
| 561 | CAGCAGGAGCUCCUGGCGC | 2084 | 561 | CAGCAGGAGCUCCUGGCGC | 2084 | 579 | GCGCCAGGAGCUCCUGCUG | 2379 |
| 579 | CUCAAGCAGCAGCAGCAGC | 2085 | 579 | CUCAAGCAGCAGCAGCAGC | 2085 | 597 | GCUGCUGCUGCUGCUUGAG | 2380 |
| 597 | CUGCAGAAGCAGCUCCUGU | 2086 | 597 | CUGCAGAAGCAGCUCCUGU | 2086 | 615 | ACAGGAGCUGCUUCUGCAG | 2381 |
| 615 | UUCGCUGAGUUCCAGAAAC | 2087 | 615 | UUCGCUGAGUUCCAGAAAC | 2087 | 633 | GUUUCUGGAACUCAGCGAA | 2382 |
| 633 | CAGCAUGACCACCUGACAA | 2088 | 633 | CAGCAUGACCACCUGACAA | 2088 | 651 | UUGUCAGGUGGUCAUGCUG | 2383 |
| 651 | AGGCAGCAUGAGGUCCAGC | 2089 | 651 | AGGCAGCAUGAGGUCCAGC | 2089 | 669 | GCUGGACCUCAUGCUGCCU | 2384 |
| 669 | CUGCAGAAGCACCUCAAGC | 2090 | 669 | CUGCAGAAGCACCUCAAGC | 2090 | 687 | GCUUGAGGUGCUUCUGCAG | 2385 |
| 687 | CAGCAGCAGGAGAUGCUGG | 2091 | 687 | CAGCAGCAGGAGAUGCUGG | 2091 | 705 | CCAGCAUCUCCUGCUGCUG | 2386 |
| 705 | GCAGCCAAGCAGCAGCAGG | 2092 | 705 | GCAGCCAAGCAGCAGCAGG | 2092 | 723 | CCUGCUGCUGCUUGGCUGC | 2387 |
| 723 | GAGAUGCUGGCAGCCAAGC | 2093 | 723 | GAGAUGCUGGCAGCCAAGC | 2093 | 741 | GCUUGGCUGCCAGCAUCUC | 2388 |
| 741 | CGGCAGCAGGAGCUGGAGC | 2094 | 741 | CGGCAGCAGGAGCUGGAGC | 2094 | 759 | GCUCCAGCUCCUGCUGCCG | 2389 |
| 759 | CAGCAGCGGCAGCGGGAGC | 2095 | 759 | CAGCAGCGGCAGCGGGAGC | 2095 | 777 | GCUCCCGCUGCCGCUGCUG | 2390 |
| 777 | CAGCAGCGGCAGGAAGAGC | 2096 | 777 | CAGCAGCGGCAGGAAGAGC | 2096 | 795 | GCUCUUCCUGCCGCUGCUG | 2391 |
| 795 | CUGGAGAAGCAGCGGCUGG | 2097 | 795 | CUGGAGAAGCAGCGGCUGG | 2097 | 813 | CCAGCCGCUGCUUCUCCAG | 2392 |
| 813 | GAGCAGCAGCUGCUCAUCC | 2098 | 813 | GAGCAGCAGCUGCUCAUCC | 2098 | 831 | GGAUGAGCAGCUGCUGCUC | 2393 |
| 831 | CUGCGGAACAAGGAGAAGA | 2099 | 831 | CUGCGGAACAAGGAGAAGA | 2099 | 849 | UCUUCUCCUUGUUCCGCAG | 2394 |
| 849 | AGCAAAGAGAGUGCCAUUG | 2100 | 849 | AGCAAAGAGAGUGCCAUUG | 2100 | 867 | CAAUGGCACUCUCUUUGCU | 2395 |
| 867 | GCCAGCACUGAGGUAAAGC | 2101 | 867 | GCCAGCACUGAGGUAAAGC | 2101 | 885 | GCUUUACCUCAGUGCUGGC | 2396 |
| 885 | CUGAGGCUCCAGGAAUUCC | 2102 | 885 | CUGAGGCUCCAGGAAUUCC | 2102 | 903 | GGAAUUCCUGGAGCCUCAG | 2397 |
| 903 | CUCUUGUCGAAGUCAAAGG | 2103 | 903 | CUCUUGUCGAAGUCAAAGG | 2103 | 921 | CCUUUGACUUCGACAAGAG | 2398 |
| 921 | GAGCCCACACCAGGCGGCC | 2104 | 921 | GAGCCCACACCAGGCGGCC | 2104 | 939 | GGCCGCCUGGUGUGGGCUC | 2399 |
| 939 | CUCAACCAUUCCCUCCCAC | 2105 | 939 | CUCAACCAUUCCCUCCCAC | 2105 | 957 | GUGGGAGGGAAUGGUUGAG | 2400 |
| 957 | CAGCACCCCAAAUGCUGGG | 2106 | 957 | CAGCACCCCAAAUGCUGGG | 2106 | 975 | CCCAGCAUUUGGGGUGCUG | 2401 |
| 975 | GGAGCCCACCAUGCUUCUU | 2107 | 975 | GGAGCCCACCAUGCUUCUU | 2107 | 993 | AAGAAGCAUGGUGGGCUCC | 2402 |
| 993 | UUGGACCAGAGUUCCCCUC | 2108 | 993 | UUGGACCAGAGUUCCCCUC | 2108 | 1011 | GAGGGGAACUCUGGUCCAA | 2403 |
| 1011 | CCCCAGAGCGGCCCCCCUG | 2109 | 1011 | CCCCAGAGCGGCCCCCCUG | 2109 | 1029 | CAGGGGGGCCGCUCUGGGG | 2404 |
| 1029 | GGGACGCCUCCGUCCUACA | 2110 | 1029 | GGGACGCCUCCCUCCUACA | 2110 | 1047 | UGUAGGAGGGAGGCGUCCC | 2405 |
| 1047 | AAACUGCCUUUGCCUGGGC | 2111 | 1047 | AAACUGCCUUUGCCUGGGC | 2111 | 1065 | GCCCAGGCAAAGGCAGUUU | 2406 |
| 1065 | CCGUACGACAGUCGAGACG | 2112 | 1065 | CCCUACGACAGUCGAGACG | 2112 | 1083 | CGUGUCGACUGUCGUAGGG | 2407 |
| 1083 | GACUUCCCCCUCCGCAAAA | 2113 | 1083 | GACUUCCCCCUCCGCAAAA | 2113 | 1101 | UUUUGCGGAGGGGGAAGUC | 2408 |
| 1101 | ACAGCCUCUGAACCCAACU | 2114 | 1101 | ACAGCCUCUGAACCCAACU | 2114 | 1119 | AGUUGGGUUCAGAGGCUGU | 2409 |
| 1119 | UUGAAAGUGCGUUCAAGGC | 2115 | 1119 | UUGAAAGUGCGUUCAAGGC | 2115 | 1137 | GCCUUGAACGCACUUUCAA | 2410 |
| 1137 | CUAAAACAGAAGGUGGCUG | 2116 | 1137 | CUAAAACAGAAGGUGGCUG | 2116 | 1155 | CAGCCACCUUCUGUUUUAG | 2411 |
| 1155 | GAGCGGAGAAGCAGUCCCC | 2117 | 1155 | GAGCGGAGAAGCAGUCCCC | 2117 | 1173 | GGGGACUGCUUCUCCGCUC | 2412 |
| 1173 | CUCCUGCGUCGCAAGGAUG | 2118 | 1173 | CUCCUGCGUCGCAAGGAUG | 2118 | 1191 | CAUCCUUGCGACGCAGGAG | 2413 |
| 1191 | GGGACUGUUAUUAGCACCU | 2119 | 1191 | GGGACUGUUAUUAGCACCU | 2119 | 1209 | AGGUGCUAAUAACAGUCCC | 2414 |
| 1209 | UUUAAGAAGAGAGCUGUUG | 2120 | 1209 | UUUAAGAAGAGAGCUGUUG | 2120 | 1227 | CAACAGCUCUCUUCUUAAA | 2415 |
| 1227 | GAGAUCACAGGUGCCGGGC | 2121 | 1227 | GAGAUCACAGGUGCCGGGC | 2121 | 1245 | GCCCGGCACCUGUGAUCUC | 2416 |
| 1245 | CCUGGGGCGUCGUCCGUGU | 2122 | 1245 | CCUGGGGCGUCGUCCGUGU | 2122 | 1263 | ACACGGACGACGCCCCAGG | 2417 |
| 1263 | UGUAACAGCGCACCCGGCU | 2123 | 1263 | UGUAACAGCGCACCCGGCU | 2123 | 1281 | AGCCGGGUGCGCUGUUACA | 2418 |
| 1281 | UCCGGCCCCAGCUCUCCCA | 2124 | 1281 | UCCGGCCCCAGCUCUCCCA | 2124 | 1299 | UGGGAGAGCUGGGGCCGGA | 2419 |
| 1299 | AACAGCUCCCACAGCACCA | 2125 | 1299 | AACAGCUCCCACAGCACCA | 2125 | 1317 | UGGUGCUGUGGGAGCUGUU | 2420 |
| 1317 | AUCGCUGAGAAUGGCUUUA | 2126 | 1317 | AUCGCUGAGAAUGGCUUUA | 2126 | 1335 | UAAAGCCAUUCUCAGCGAU | 2421 |
| 1335 | ACUGGCUCAGUCCCCAACA | 2127 | 1335 | ACUGGCUCAGUCCCCAACA | 2127 | 1353 | UGUUGGGGACUGAGCCAGU | 2422 |
| 1353 | AUCCCCACUGAGAUGCUCC | 2128 | 1353 | AUCCCCACUGAGAUGCUCC | 2128 | 1371 | GGAGCAUCUCAGUGGGGAU | 2423 |
| 1371 | CCUCAGCACCGAGCCCUCC | 2129 | 1371 | CCUCAGCACCGAGCCCUCC | 2129 | 1389 | GGAGGGCUCGGUGCUGAGG | 2424 |
| 1389 | CCUCUGGACAGCUCCCCCA | 2130 | 1389 | CCUCUGGACAGCUCCCCCA | 2130 | 1407 | UGGGGGAGCUGUCCAGAGG | 2425 |
| 1407 | AACCAGUUCAGCCUCUACA | 2131 | 1407 | AACCAGUUCAGCCUCUACA | 2131 | 1425 | UGUAGAGGCUGAACUGGUU | 2426 |
| 1425 | ACGUCUCCUUCUCUGCCCA | 2132 | 1425 | ACGUCUCCUUCUCUGCCCA | 2132 | 1443 | UGGGCAGAGAAGGAGACGU | 2427 |
| 1443 | AACAUCUCCCUAGGGCUGC | 2133 | 1443 | AACAUCUCCCUAGGGCUGC | 2133 | 1461 | GCAGCCCUAGGGAGAUGUU | 2428 |
| 1461 | CAGGCCACGGUCACUGUCA | 2134 | 1461 | CAGGCCACGGUCACUGUCA | 2134 | 1479 | UGACAGUGACCGUGGCCUG | 2429 |
| 1479 | ACCAACUCACACCUCACUG | 2135 | 1479 | ACCAACUCACACCUCACUG | 2135 | 1497 | CAGUGAGGUGUGAGUUGGU | 2430 |
| 1497 | GCCUCCCCGAAGCUGUCGA | 2136 | 1497 | GCCUCCCCGAAGCUGUCGA | 2136 | 1515 | UCGACAGCUUCGGGGAGGC | 2431 |
| 1515 | ACACAGCAGGAGGCCGAGA | 2137 | 1515 | ACACAGCAGGAGGCCGAGA | 2137 | 1533 | UCUCGGCCUCCUGCUGUGU | 2432 |
| 1533 | AGGCAGGCCCUCCAGUCCC | 2138 | 1533 | AGGCAGGCCCUCCAGUCCC | 2138 | 1551 | GGGACUGGAGGGCCUGCCU | 2433 |
| 1551 | CUGCGGCAGGGUGGCACGC | 2139 | 1551 | CUGCGGCAGGGUGGCACGC | 2139 | 1569 | GCGUGCCACCCUGCCGCAG | 2434 |
| 1569 | CUGACCGGCAAGUUCAUGA | 2140 | 1569 | CUGACCGGCAAGUUCAUGA | 2140 | 1587 | UCAUGAACUUGCCGGUCAG | 2435 |
| 1587 | AGCACAUCCUCUAUUCCUG | 2141 | 1587 | AGCACAUCCUCUAUUCCUG | 2141 | 1605 | CAGGAAUAGAGGAUGUGCU | 2436 |
| 1605 | GGCUGCCUGCUGGGCGUGG | 2142 | 1605 | GGCUGCCUGCUGGGCGUGG | 2142 | 1623 | CCACGCCCAGCAGGCAGCC | 2437 |
| 1623 | GCACUGGAGGGCGACGGGA | 2143 | 1623 | GCACUGGAGGGCGACGGGA | 2143 | 1641 | UCCCGUCGCCCUCCAGUGC | 2438 |
| 1641 | AGCCCCCACGGGCAUGCCU | 2144 | 1641 | AGCCCCCACGGGCAUGCCU | 2144 | 1659 | AGGCAUGCCCGUGGGGGCU | 2439 |
| 1659 | UCCCUGCUGCAGCAUGUGC | 2145 | 1659 | UCCCUGCUGCAGCAUGUGC | 2145 | 1677 | GCACAUGCUGCAGCAGGGA | 2440 |
| 1677 | CUGUUGCUGGAGCAGGCCC | 2146 | 1677 | CUGUUGCUGGAGCAGGCCC | 2146 | 1695 | GGGCCUGCUCCAGCAACAG | 2441 |
| 1695 | CGGCAGCAGAGCACCCUCA | 2147 | 1695 | CGGCAGCAGAGCACCCUCA | 2147 | 1713 | UGAGGGUGCUCUGCUGCCG | 2442 |
| 1713 | AUUGCUGUGCCACUCCACG | 2148 | 1713 | AUUGCUGUGCCACUCCACG | 2148 | 1731 | CGUGGAGUGGCACAGCAAU | 2443 |
| 1731 | GGGCAGUCCCCACUAGUGA | 2149 | 1731 | GGGCAGUCCCCACUAGUGA | 2149 | 1749 | UCACUAGUGGGGACUGCCC | 2444 |
| 1749 | ACGGGUGAACGUGUGGCCA | 2150 | 1749 | ACGGGUGAACGUGUGGCCA | 2150 | 1767 | UGGCCACACGUUCACCCGU | 2445 |
| 1767 | ACCAGCAUGCGGACGGUAG | 2151 | 1767 | ACCAGCAUGCGGACGGUAG | 2151 | 1785 | CUACCGUCCGCAUGCUGGU | 2446 |
| 1785 | GGCAAGCUCCCGCGGCAUC | 2152 | 1785 | GGCAAGCUCCCGCGGCAUC | 2152 | 1803 | GAUGCCGCGGGAGCUUGCC | 2447 |
| 1803 | CGGCCCCUGAGCCGCACUC | 2153 | 1803 | CGGCCCCUGAGCCGCACUC | 2153 | 1821 | GAGUGCGGCUCAGGGGCCG | 2448 |
| 1821 | CAGUCCUCACCGCUGCCGC | 2154 | 1821 | CAGUCCUCACCGCUGCCGC | 2154 | 1839 | GCGGCAGCGGUGAGGACUG | 2449 |
| 1839 | CAGAGUCCCCAGGCCCUGC | 2155 | 1839 | CAGAGUCCCCAGGCCCUGC | 2155 | 1857 | GCAGGGCCUGGGGACUCUG | 2450 |
| 1857 | CAGCAGCUGGUCAUGCAAC | 2156 | 1857 | CAGCAGCUGGUCAUGCAAC | 2156 | 1875 | GUUGCAUGACCAGCUGCUG | 2451 |
| 1875 | CAACAGCACCAGCAGUUCC | 2157 | 1875 | CAACAGCACCAGCAGUUCC | 2157 | 1893 | GGAACUGCUGGUGCUGUUG | 2452 |
| 1893 | CUGGAGAAGCAGAAGCAGC | 2158 | 1893 | CUGGAGAAGCAGAAGCAGC | 2158 | 1911 | GCUGCUUCUGCUUCUCCAG | 2453 |
| 1911 | CAGCAGCUACAGCUGGGCA | 2159 | 1911 | CAGCAGCUACAGCUGGGCA | 2159 | 1929 | UGCCCAGCUGUAGCUGCUG | 2454 |
| 1929 | AAGAUCCUCACCAAGACAG | 2160 | 1929 | AAGAUCCUCACCAAGACAG | 2160 | 1947 | CUGUCUUGGUGAGGAUCUU | 2455 |
| 1947 | GGGGAGCUGCCCAGGCAGC | 2161 | 1947 | GGGGAGCUGCCCAGGCAGC | 2161 | 1965 | GCUGCCUGGGCAGCUCCCC | 2456 |
| 1965 | CCCACCACCCACCCUGAGG | 2162 | 1965 | CCCACCACCCACCCUGAGG | 2162 | 1983 | CCUCAGGGUGGGUGGUGGG | 2457 |
| 1983 | GAGACAGAGGAGGAGGUGA | 2163 | 1983 | GAGACAGAGGAGGAGCUGA | 2163 | 2001 | UCAGCUCCUCCUCUGUCUC | 2458 |
| 2001 | ACGGAGCAGCAGGAGGUCU | 2164 | 2001 | ACGGAGCAGCAGGAGGUCU | 2164 | 2019 | AGACCUCCUGCUGCUCCGU | 2459 |
| 2019 | UUGCUGGGGGAGGGAGCCC | 2165 | 2019 | UUGCUGGGGGAGGGAGCCC | 2165 | 2037 | GGGCUCCCUCCCCCAGCAA | 2460 |
| 2037 | CUGACCAUGCCCCGGGAGG | 2166 | 2037 | CUGACCAUGCCCCGGGAGG | 2166 | 2055 | CCUCCCGGGGCAUGGUCAG | 2461 |
| 2055 | GGCUCCACAGAGAGUGAGA | 2167 | 2055 | GGCUCCACAGAGAGUGAGA | 2167 | 2073 | UCUCACUCUCUGUGGAGCC | 2462 |
| 2073 | AGCACACAGGAAGACCUGG | 2168 | 2073 | AGCACACAGGAAGACCUGG | 2168 | 2091 | CCAGGUCUUCCUGUGUGCU | 2463 |
| 2091 | GAGGAGGAGGACGAGGAAG | 2169 | 2091 | GAGGAGGAGGACGAGGAAG | 2169 | 2109 | CUUCCUCGUCCUCCUCCUC | 2464 |
| 2109 | GACGAUGGGGAGGAGGAGG | 2170 | 2109 | GACGAUGGGGAGGAGGAGG | 2170 | 2127 | CCUCCUCCUCCCCAUCGUC | 2465 |
| 2127 | GAGGAUUGCAUCCAGGUUA | 2171 | 2127 | GAGGAUUGCAUCCAGGUUA | 2171 | 2145 | UAACCUGGAUGCAAUCCUC | 2466 |
| 2145 | AAGGACGAGGAGGGCGAGA | 2172 | 2145 | AAGGACGAGGAGGGGGAGA | 2172 | 2163 | UCUCGCCCUCCUCGUCCUU | 2467 |
| 2163 | AGUGGUGCUGAGGAGGGGC | 2173 | 2163 | AGUGGUGCUGAGGAGGGGC | 2173 | 2181 | GCCCCUCCUCAGCACCACU | 2468 |
| 2181 | CCCGACUUGGAGGAGCCUG | 2174 | 2181 | GCCGACUUGGAGGAGCCUG | 2174 | 2199 | CAGGCUCCUCCAAGUCGGG | 2469 |
| 2199 | GGUGCUGGAUACAAAAAAC | 2175 | 2199 | GGUGCUGGAUACAAAAAAC | 2175 | 2217 | GUUUUUUGUAUCCAGCACC | 2470 |
| 2217 | CUGUUCUCAGAUGCCCAGC | 2176 | 2217 | CUGUUCUCAGAUGCCCAGC | 2176 | 2235 | GCUGGGCAUCUGAGAACAG | 2471 |
| 2235 | CCGCUGCAGCCUUUGCAGG | 2177 | 2235 | CCGCUGCAGCCUUUGCAGG | 2177 | 2253 | CCUGCAAAGGCUGCAGCGG | 2472 |
| 2253 | GUGUACCAGGCGCCCCUCA | 2178 | 2253 | GUGUACCAGGCGCCCCUCA | 2178 | 2271 | UGAGGGGCGCCUGGUACAC | 2473 |
| 2271 | AGCCUGGCCACUGUGCCCC | 2179 | 2271 | AGCCUGGCCACUGUGCCCC | 2179 | 2289 | GGGGCACAGUGGCCAGGCU | 2474 |
| 2289 | CACCAGGCCCUGGGCCGUA | 2180 | 2289 | CACCAGGCCCUGGGCCGUA | 2180 | 2307 | UACGGCCCAGGGCCUGGUG | 2475 |
| 2307 | ACCCAGUCCUCCCCUGCUG | 2181 | 2307 | ACCCAGUCCUCCCCUGCUG | 2181 | 2325 | CAGCAGGGGAGGACUGGGU | 2476 |
| 2325 | GCCCCUGGGGGCAUGAAGA | 2182 | 2325 | GCCCCUGGGGGCAUGAAGA | 2182 | 2343 | UCUUCAUGCCCCCAGGGGC | 2477 |
| 2343 | AGCCCCCCAGACCAGCCCG | 2183 | 2343 | AGCCCCCCAGACCAGCCCG | 2183 | 2361 | CGGGCUGGUCUGGGGGGCU | 2478 |
| 2361 | GUCAAGCACCUCUUCACCA | 2184 | 2361 | GUCAAGCACCUCUUCACCA | 2184 | 2379 | UGGUGAAGAGGUGCUUGAC | 2479 |
| 2379 | ACAGGUGUGGUCUAGGACA | 2185 | 2379 | ACAGGUGUGGUCUACGACA | 2185 | 2397 | UGUCGUAGACCACACCUGU | 2480 |
| 2397 | ACGUUCAUGCUAAAGCACC | 2186 | 2397 | ACGUUCAUGCUAAAGCACC | 2186 | 2415 | GGUGCUUUAGCAUGAACGU | 2481 |
| 2415 | CAGUGCAUGUGCGGGAACA | 2187 | 2415 | CAGUGCAUGUGCGGGAACA | 2187 | 2433 | UGUUCCCGCACAUGCACUG | 2482 |
| 2433 | ACACACGUGCACCCUGAGC | 2188 | 2433 | ACACACGUGCACCCUGAGC | 2188 | 2451 | GCUCAGGGUGCACGUGUGU | 2483 |
| 2451 | CAUGCUGGCCGGAUCCAGA | 2189 | 2451 | CAUGCUGGCCGGAUCCAGA | 2189 | 2469 | UCUGGAUCCGGCCAGCAUG | 2484 |
| 2469 | AGCAUCUGGUCCCGGCUGC | 2190 | 2469 | AGCAUCUGGUCCCGGCUGC | 2190 | 2487 | GCAGCCGGGACCAGAUGCU | 2485 |
| 2487 | CAGGAGACAGGCCUGCUUA | 2191 | 2487 | CAGGAGACAGGCCUGCUUA | 2191 | 2505 | UAAGCAGGCCUGUCUCCUG | 2486 |
| 2505 | AGCAAGUGCGAGCGGAUCC | 2192 | 2505 | AGCAAGUGCGAGCGGAUCC | 2192 | 2523 | GGAUCCGCUCGCACUUGCU | 2487 |
| 2523 | CGAGGUCGCAAAGCCACGC | 2193 | 2523 | CGAGGUCGCAAAGCCACGC | 2193 | 2541 | GCGUGGCUUUGCGACCUCG | 2488 |
| 2541 | CUAGAUGAGAUCCAGACAG | 2194 | 2541 | CUAGAUGAGAUCCAGACAG | 2194 | 2559 | CUGUCUGGAUCUCAUCUAG | 2489 |
| 2559 | GUGCACUCUGAAUACCACA | 2195 | 2559 | GUGCACUCUGAAUACCACA | 2195 | 2577 | UGUGGUAUUCAGAGUGCAC | 2490 |
| 2577 | ACCCUGCUCUAUGGGACCA | 2196 | 2577 | ACCCUGCUCUAUGGGACCA | 2196 | 2595 | UGGUCCCAUAGAGCAGGGU | 2491 |
| 2595 | AGUCCCCUCAACCGGCAGA | 2197 | 2595 | AGUCCCCUCAACCGGCAGA | 2197 | 2613 | UCUGCCGGUUGAGGGGACU | 2492 |
| 2613 | AAGCUAGACAGCAAGAAGU | 2198 | 2613 | AAGCUAGACAGCAAGAAGU | 2198 | 2631 | ACUUCUUGCUGUCUAGCUU | 2493 |
| 2631 | UUGCUCGGCCCCAUCAGCC | 2199 | 2631 | UUGCUCGGCCCCAUCAGCC | 2199 | 2649 | GGCUGAUGGGGCCGAGCAA | 2494 |
| 2649 | CAGAAGAUGUAUGCUGUGC | 2200 | 2649 | CAGAAGAUGUAUGCUGUGC | 2200 | 2667 | GCACAGCAUACAUCUUCUG | 2495 |
| 2667 | CUGCCUUGUGGGGGCAUCG | 2201 | 2667 | CUGCCUUGUGGGGGCAUCG | 2201 | 2685 | CGAUGCCCCCACAAGGCAG | 2496 |
| 2685 | GGGGUGGACAGUGACACCG | 2202 | 2685 | GGGGUGGACAGUGACACCG | 2202 | 2703 | CGGUGUCACUGUCCACCCC | 2497 |
| 2703 | GUGUGGAAUGAGAUGCACU | 2203 | 2703 | GUGUGGAAUGAGAUGCACU | 2203 | 2721 | AGUGCAUCUCAUUCCACAC | 2498 |
| 2721 | UCCUCCAGUGCUGUGCGCA | 2204 | 2721 | UCCUCCAGUGCUGUGCGCA | 2204 | 2739 | UGCGCACAGCACUGGAGGA | 2499 |
| 2739 | AUGGCAGUGGGCUGCCUGC | 2205 | 2739 | AUGGCAGUGGGCUGCCUGC | 2205 | 2757 | GCAGGCAGCCCACUGCCAU | 2500 |
| 2757 | CUGGAGCUGGCCUUCAAGG | 2206 | 2757 | CUGGAGCUGGGCUUCAAGG | 2206 | 2775 | CCUUGAAGGCCAGGUCCAG | 2501 |
| 2775 | GUGGCUGCAGGAGAGCUCA | 2207 | 2775 | GUGGCUGCAGGAGAGCUCA | 2207 | 2793 | UGAGCUCUCCUGCAGCCAC | 2502 |
| 2793 | AAGAAUGGAUUUGCCAUCA | 2208 | 2793 | AAGAAUGGAUUUGCCAUCA | 2208 | 2811 | UGAUGGCAAAUCCAUUCUU | 2503 |
| 2811 | AUCCGGCCCCCAGGACACC | 2209 | 2811 | AUCCGGCCCCCAGGACACC | 2209 | 2829 | GGUGUCCUGGGGGCCGGAU | 2504 |
| 2829 | CACGCCGAGGAAUCCACAG | 2210 | 2829 | CACGCCGAGGAAUCCACAG | 2210 | 2847 | CUGUGGAUUCCUCGGCGUG | 2505 |
| 2847 | GCCAUGGGAUUCUGCUUCU | 2211 | 2847 | GCCAUGGGAUUCUGCUUCU | 2211 | 2865 | AGAAGCAGAAUCCCAUGGC | 2506 |
| 2865 | UUCAACUCUGUAGCCAUCA | 2212 | 2865 | UUCAACUCUGUAGCCAUCA | 2212 | 2883 | UGAUGGCUACAGAGUUGAA | 2507 |
| 2883 | ACCGCAAAACUCCUACAGC | 2213 | 2883 | ACCGCAAAACUCCUACAGC | 2213 | 2901 | GCUGUAGGAGUUUUGCGGU | 2508 |
| 2901 | CAGAAGUUGAACGUGGGCA | 2214 | 2901 | CAGAAGUUGAACGUGGGCA | 2214 | 2919 | UGCCCACGUUCAACUUCUG | 2509 |
| 2919 | AAGGUCCUCAUCGUGGACU | 2215 | 2919 | AAGGUCCUCAUCGUGGACU | 2215 | 2937 | AGUCCACGAUGAGGACCUU | 2510 |
| 2937 | UGGGACAUUCACCAUGGCA | 2216 | 2937 | UGGGACAUUCACCAUGGCA | 2216 | 2955 | UGCCAUGGUGAAUGUCCCA | 2511 |
| 2955 | AAUGGCACCCAGCAGGCGU | 2217 | 2955 | AAUGGCACCCAGCAGGCGU | 2217 | 2973 | ACGCCUGCUGGGUGGCAUU | 2512 |
| 2973 | UUCUACAAUGACCCCUCUG | 2218 | 2973 | UUCUACAAUGACCCCUCUG | 2218 | 2991 | CAGAGGGGUCAUUGUAGAA | 2513 |
| 2991 | GUGCUCUACAUCUCUCUGC | 2219 | 2991 | GUGCUCUACAUCUCUCUGC | 2219 | 3009 | GCAGAGAGAUGUAGAGGAC | 2514 |
| 3009 | CAUCGCUAUGACAACGGGA | 2220 | 3009 | CAUCGCUAUGACAACGGGA | 2220 | 3027 | UCCCGUUGUCAUAGCGAUG | 2515 |
| 3027 | AACUUCUUUCCAGGCUCUG | 2221 | 3027 | AACUUCUUUCCAGGCUCUG | 2221 | 3045 | CAGAGCCUGGAAAGAAGUU | 2516 |
| 3045 | GGGGCUCCUGAAGAGGUUG | 2222 | 3045 | GGGGCUCCUGAAGAGGUUG | 2222 | 3063 | CAACCUCUUCAGGAGCCCC | 2517 |
| 3063 | GGUGGAGGACCAGGCGUGG | 2223 | 3063 | GGUGGAGGACCAGGCGUGG | 2223 | 3081 | CCACGCCUGGUCCUCCACC | 2518 |
| 3081 | GGGUACAAUGUGAACGUGG | 2224 | 3081 | GGGUACAAUGUGAACGUGG | 2224 | 3099 | CCACGUUCACAUUGUACCC | 2519 |
| 3099 | GCAUGGACAGGAGGUGUGG | 2225 | 3099 | GCAUGGACAGGAGGUGUGG | 2225 | 3117 | CCACACCUCCUGUCCAUGC | 2520 |
| 3117 | GACCCCCCCAUUGGAGACG | 2226 | 3117 | GACCCCCCCAUUGGAGACG | 2226 | 3135 | CGUCUCCAAUGGGGGGGUC | 2521 |
| 3135 | GUGGAGUACCUUACAGCCU | 2227 | 3135 | GUGGAGUACCUUACAGCCU | 2227 | 3153 | AGGCUGUAAGGUACUCCAC | 2522 |
| 3153 | UUCAGGACAGUGGUGAUGC | 2228 | 3153 | UUCAGGACAGUGGUGAUGC | 2228 | 3171 | GCAUCACCACUGUCCUGAA | 2523 |
| 3171 | CCCAUUGCCCACGAGUUCU | 2229 | 3171 | CCCAUUGCCCACGAGUUCU | 2229 | 3189 | AGAACUCGUGGGCAAUGGG | 2524 |
| 3189 | UCACCUGAUGUGGUCCUAG | 2230 | 3189 | UCACCUGAUGUGGUCCUAG | 2230 | 3207 | CUAGGACCACAUCAGGUGA | 2525 |
| 3207 | GUCUCCGCCGGGUUUGAUG | 2231 | 3207 | GUCUCCGCCGGGUUUGAUG | 2231 | 3225 | CAUCAAACCCGGCGGAGAC | 2526 |
| 3225 | GCUGUUGAAGGACAUCUGU | 2232 | 3225 | GCUGUUGAAGGACAUCUGU | 2232 | 3243 | ACAGAUGUCCUUCAACAGC | 2527 |
| 3243 | UCUCCUCUGGGUGGCUACU | 2233 | 3243 | UCUCCUCUGGGUGGCUACU | 2233 | 3261 | AGUAGCCACCCAGAGGAGA | 2528 |
| 3261 | UCUGUCACCGCCAGAUGUU | 2234 | 3261 | UCUGUCACCGCCAGAUGUU | 2234 | 3279 | AACAUCUGGCGGUGACAGA | 2529 |
| 3279 | UUUGGCCACUUGACCAGGC | 2235 | 3279 | UUUGGCCACUUGACCAGGC | 2235 | 3297 | GCCUGGUCAAGUGGCCAAA | 2530 |
| 3297 | CAGCUGAUGACCCUGGCAG | 2236 | 3297 | CAGCUGAUGACCCUGGCAG | 2236 | 3315 | CUGCCAGGGUCAUCAGCUG | 2531 |
| 3315 | GGGGGCCGGGUGGUGCUGG | 2237 | 3315 | GGGGGCCGGGUGGUGCUGG | 2237 | 3333 | CCAGCACCACCCGGCCCCC | 2532 |
| 3333 | GCCCUGGAGGGAGGCCAUG | 2238 | 3333 | GCCCUGGAGGGAGGCCAUG | 2238 | 3351 | CAUGGCCUCCCUCCAGGGC | 2533 |
| 3351 | GACUUGACCGCCAUCUGUG | 2239 | 3351 | GACUUGACCGCCAUCUGUG | 2239 | 3369 | CACAGAUGGCGGUCkAGUC | 2534 |
| 3369 | GAUGCCUCUGAGGCUUGUG | 2240 | 3369 | GAUGCCUCUGAGGCUUGUG | 2240 | 3387 | CACAAGCCUCAGAGGCAUC | 2535 |
| 3387 | GUCUCGGCUCUGCUCAGUG | 2241 | 3387 | GUCUCGGCUCUGCUCAGUG | 2241 | 3405 | CACUGAGCAGAGCCGAGAC | 2536 |
| 3405 | GAUGAGCUGCAGCCCUUGG | 2242 | 3405 | GAUGAGCUGCAGCCCUUGG | 2242 | 3423 | CCAAGGGCUGCAGCUCUAC | 2537 |
| 3423 | GAUGAGGCAGUCUUGCAGC | 2243 | 3423 | GAUGAGGCAGUCUUGCAGC | 2243 | 3441 | GCUGCAAGACUGCCUCAUC | 2538 |
| 3441 | CAAAAGCCCAACAUCAACG | 2244 | 3441 | CAAAAGCCCAACAUCAACG | 2244 | 3459 | CGUUGAUGUUGGGCUUUUG | 2539 |
| 3459 | GCAGUGGCCACGCUAGAGA | 2245 | 3459 | GCAGUGGCCACGCUAGAGA | 2245 | 3477 | UCUCUAGCGUGGCCACUGC | 2540 |
| 3477 | AAAGUCAUCGAGAUCCAGA | 2246 | 3477 | AAAGUCAUCGAGAUCCAGA | 2246 | 3495 | UCUGGAUCUCGAUGACUUU | 2541 |
| 3495 | AGCAAACACUGGAGCUGUG | 2247 | 3495 | AGCAAACACUGGAGCUGUG | 2247 | 3513 | CACAGCUCCAGUGUUUGCU | 2542 |
| 3513 | GUGCAGAAGUUCGCCGCUG | 2248 | 3513 | GUGCAGAAGUUCGCCGCUG | 2248 | 3531 | CAGCGGCGAACUUCUGCAC | 2543 |
| 3531 | GGUCUGGGCCGGUCCCUGC | 2249 | 3531 | GGUCUGGGCCGGUCCCUGC | 2249 | 3549 | GCAGGGACCGGCCCAGACC | 2544 |
| 3549 | CGAGAGGCCCAAGCAGGUG | 2250 | 3549 | CGAGAGGCCCAAGCAGGUG | 2250 | 3567 | CACCUGCUUGGGCCUCUCG | 2545 |
| 3567 | GAGACCGAGGAGGCCGAGA | 2251 | 3567 | GAGACCGAGGAGGCCGAGA | 2251 | 3585 | UCUCGGCCUCCUCGGUCUC | 2546 |
| 3585 | ACUGUGAGCGCGAUGGCCU | 2252 | 3585 | ACUGUGAGCGCCAUGGCCU | 2252 | 3603 | AGGCCAUGGCGCUCACAGU | 2547 |
| 3603 | UUGCUGUCGGUGGGGGCCG | 2253 | 3603 | UUGCUGUCGGUGGGGGCCG | 2253 | 3621 | CGGCCCCCACCGACAGCAA | 2548 |
| 3621 | GAGCAGGCCCAGGCUGCGG | 2254 | 3621 | GAGCAGGCCCAGGCUGCGG | 2254 | 3639 | CCGCAGCCUGGGCCUGCUC | 2549 |
| 3639 | GCAGCCCGGGAACACAGCC | 2255 | 3639 | GCAGCCCGGGAACACAGCC | 2255 | 3657 | GGCUGUGUUCCCGGGCUGC | 2550 |
| 3657 | CCCAGGCCGGCAGAGGAGC | 2256 | 3657 | CCCAGGCCGGCAGAGGAGC | 2256 | 3675 | GCUCCUCUGCCGGCCUGGG | 2551 |
| 3675 | CCCAUGGAGCAGGAGCCUG | 2257 | 3675 | CCCAUGGAGCAGGAGCCUG | 2257 | 3693 | CAGGCUCCUGCUCCAUGGG | 2552 |
| 3693 | GCCCUGUGACGCCCCGGCC | 2258 | 3693 | GCCCUGUGACGCCCCGGCC | 2258 | 3711 | GGCCGGGGCGUCACAGGGC | 2553 |
| 3711 | CCCCAUCCCUCUGGGCUUC | 2259 | 3711 | CCCCAUCCCUCUGGGCUUC | 2259 | 3729 | GAAGCCCAGAGGGAUGGGG | 2554 |
| 3729 | CACCAUUGUGAUUUUGUUU | 2260 | 3729 | CACCAUUGAGAUUUUGUUU | 2260 | 3747 | AAACAAAAUCACAAUGGUG | 2555 |
| 3747 | UAUUUUUUCUAUUAAAAAC | 2261 | 3747 | UAUUUUUUCUAUUAAAAAC | 2261 | 3765 | GUUUUUAAUAGAAAAAAUA | 2556 |
| 3765 | CAAAAAGUCACACAUUCAA | 2262 | 3765 | CAAAAAGUCACACAUUCAA | 2262 | 3783 | UUGAAUGUGUGACUUUUUG | 2557 |
| 3783 | ACAAGGUGUGCCGUGUGGG | 2263 | 3783 | ACAAGGUGUGCCGUGUGGG | 2263 | 3801 | CCCACACGGCACACCUUGU | 2558 |
| 3801 | GUCUCUCAGCCUUGCCCCU | 2264 | 3801 | GUCUCUCAGCCUUGCCCCU | 2264 | 3819 | AGGGGCAAGGCUGAGAGAC | 2559 |
| 3819 | UCCUGCUCCUCUACGCUGC | 2265 | 3819 | UCCUGCUCCUCUACGCUGC | 2265 | 3837 | GCAGCGUAGAGGAGCAGGA | 2560 |
| 3837 | CCUCAGGCCCCCAGCCCUG | 2266 | 3837 | CCUCAGGCCCCCAGCCCUG | 2266 | 3855 | CAGGGCUGGGGGCCUGAGG | 2561 |
| 3855 | GUGGCUUCCACCUCAGCUC | 2267 | 3855 | GUGGCUUCCACCUCAGCUC | 2267 | 3873 | GAGCUGAGGUGGAAGCCAC | 2562 |
| 3873 | CUAGAAGCCUGCUCCCUCU | 2268 | 3873 | CUAGAAGCCUGCUCCCUCU | 2268 | 3891 | AGAGGGAGCAGGCUUCUAG | 2563 |
| 3891 | UGCAGGGGGUGGUGGUGUC | 2269 | 3891 | UGCAGGGGGUGGUGGUGUC | 2269 | 3909 | GACACCACCACCCCCUGCA | 2564 |
| 3909 | CUUCCCAGCCCUGUCCCAU | 2270 | 3909 | CUUCCCAGCCCUGUCCCAU | 2270 | 3927 | AUGGGACAGGGCUGGGAAG | 2565 |
| 3927 | UGUGUCCCUCCCCCCAUUU | 2271 | 3927 | UGUGUCCCUCCCCCCAUUU | 2271 | 3945 | AAAUGGGGGGAGGGACACA | 2566 |
| 3945 | UUCCUGCAUUCUGUCUGUC | 2272 | 3945 | UUCCUGCAUUCUGUCUGUC | 2272 | 3963 | GACAGACAGAAUGCAGGAA | 2567 |
| 3963 | CCUUUUCCUCCUUGGAGCC | 2273 | 3963 | CCUUUUCCUCCUUGGAGCC | 2273 | 3981 | GGCUCCAAGGAGGAAAAGG | 2568 |
| 3981 | CUGGGCCAGGUCAAGGUGG | 2274 | 3981 | CUGGGCCAGCUCAAGGUGG | 2274 | 3999 | CCACCUUGAGCUGGCCCAG | 2569 |
| 3999 | GGCACGGGGGCCCAGACAG | 2275 | 3999 | GGCACGGGGGCCCAGACAG | 2275 | 4017 | CUGUCUGGGCCCCCGUGCC | 2570 |
| 4017 | GUACUCUCCAGUUCUGGGG | 2276 | 4017 | GUACUCUCCAGUUCUGGGG | 2276 | 4035 | CCCCAGAACUGGAGAGUAC | 2571 |
| 4035 | GCCCCCCGAGUGAGGAGGG | 2277 | 4035 | GCCCCCCGAGUGAGGAGGG | 2277 | 4053 | CCCUCCUCACUCGGGGGGC | 2572 |
| 4053 | GAACGGGAAGUCGGUGCCU | 2278 | 4053 | GAACGGGAAGUCGGUGCCU | 2278 | 4071 | AGGCACCGACUUCCCGUUC | 2573 |
| 4071 | UUGGUUUCAGCUGAUUUGG | 2279 | 4071 | UUGGUUUCAGCUGAUUUGG | 2279 | 4089 | CCAAAUCAGCUGXAACCAA | 2574 |
| 4089 | GGGGGAAAUGCCUUAAUUU | 2280 | 4089 | GGGGGAAAUGCCUUAAUUU | 2280 | 4107 | AAAUUAAGGCAUUUCCCCC | 2575 |
| 4107 | UCACUCUCCUCCCUUCUCC | 2281 | 4107 | UCACUCUCCUCCCUUCUCC | 2281 | 4125 | GGAGAAGGGAGGAGAGUGA | 2576 |
| 4125 | CAGCCUCAGGGGAGGAUCU | 2282 | 4125 | CAGCCUCAGGGGAGGAUCU | 2282 | 4143 | AGAUCCUCCCCUGAGGCUG | 2577 |
| 4143 | UGGAGGAUCCACUACUGUC | 2283 | 4143 | UGGAGGAUCCACUACUGUC | 2283 | 4161 | GACAGUAGUGGAUCCUCCA | 2578 |
| 4161 | CUUUAAGAUGCAGAGUGGA | 2284 | 4161 | CUUUAAGAUGCAGAGUGGA | 2284 | 4179 | UCCACUCUGCAUCUUAAAG | 2579 |
| 4179 | AGGGGAGGUGGGCACCCAC | 2285 | 4179 | AGGGGAGGUGGGCACCCAC | 2285 | 4197 | GUGGGUGCCCACCUCCCCU | 2580 |
| 4197 | CCCUGCGAUUCUCCACCCU | 2286 | 4197 | CCCUGCGAUUCUCCACCCU | 2286 | 4215 | AGGGUGGAGAAUCGCAGGG | 2581 |
| 4215 | UUUCCCCUUCUUUCGUCCU | 2287 | 4215 | UUUCCCCUUCUUUCGUCCU | 2287 | 4233 | AGGACGAAAGAAGGGGAAA | 2582 |
| 4233 | UCACCAUCUCUGCAGACCC | 2288 | 4233 | UCACCAUCUCUGCAGACCC | 2288 | 4251 | GGGUCUGCAGAGAUGGUGA | 2583 |
| 4251 | CCUCUCCUCCUCCUUCCUC | 2289 | 4251 | CCUCUCCUCCUCCUUCCUC | 2289 | 4269 | GAGGAAGGAGGAGGAGAGG | 2584 |
| 4269 | CUUGGUCUCAGCACUGAUG | 2290 | 4269 | CUUGGUCUCAGCACUGAUG | 2290 | 4287 | CAUCAGUGCUGAGACCAAG | 2585 |
| 4287 | GGGAGGCUGGUGCCCAAGC | 2291 | 4287 | GGGAGGCUGGUGCCCAAGC | 2291 | 4305 | GCUUGGGCACCAGCCUCCC | 2586 |
| 4305 | CUGUGGCCUGCAGUCUGUG | 2292 | 4305 | CUGUGGCCUGCAGUCUGUG | 2292 | 4323 | CACAGACUGCAGGCCACAG | 2587 |
| 4323 | GAGGAGGGCUGUCUUGCCU | 2293 | 4323 | GAGGAGGGCUGUCUUGCCU | 2293 | 4341 | AGGCAAGACAGCCCUCCUC | 2588 |
| 4341 | UCACACUCCUCACAGCCUA | 2294 | 4341 | UCACACUCCUCACAGCCUA | 2294 | 4359 | UAGGCUGUGAGGAGUGUGA | 2589 |
| 4359 | ACUUCCCCUUCCCCGGGGC | 2295 | 4359 | ACUUCCCCUUCCCCGGGGC | 2295 | 4377 | GCCCCGGGGAAGGGGAAGU | 2590 |
| 4377 | CUGAGAGGGUGAAAGUGUG | 2296 | 4377 | CUGAGAGGGUGAAAGUGUG | 2296 | 4395 | CACACUUUCACCCUCUCAG | 2591 |
| 4395 | GUGGGGAAGGAGAGGACUG | 2297 | 4395 | GUGGGGAAGGAGAGGACUG | 2297 | 4413 | CAGUCCUCUCCUUCCCCAC | 2592 |
| 4413 | GGUUUCCUGGGUUCUCAGG | 2298 | 4413 | GGUUUCCUGGGUUCUCAGG | 2298 | 4431 | CCUGAGAACCCAGGAAACC | 2593 |
| 4431 | GGGCCAGGAGGAGUAACAG | 2299 | 4431 | GGGCCAGGAGGAGUAACAG | 2299 | 4449 | CUGUUACUCCUCCUGGCCC | 2594 |
| 4449 | GAACCAGGUCUGCUCCCCA | 2300 | 4449 | GAACCAGGUCUGCUCCCCA | 2300 | 4467 | UGGGGAGCAGACCUGGUUC | 2595 |
| 4467 | ACCUUACUCGGAUGGCCUC | 2301 | 4467 | ACCUUACUCGGAUGGCCUC | 2301 | 4485 | GAGGCCAUCCGAGUAAGGU | 2596 |
| 4485 | CCCUGCCCCUCUGCUGGCA | 2302 | 4485 | CCCUGCCCCUCUGCUGGCA | 2302 | 4503 | UGCCAGCAGAGGGGCAGGG | 2597 |
| 4503 | ACAGCCUGGGCAAGGGGAG | 2303 | 4503 | ACAGCCUGGGCAAGGGGAG | 2303 | 4521 | CUCCCCUUGCCCAGGCUGU | 2598 |
| 4521 | GAAGGUGGUCCCUGCAGAG | 2304 | 4521 | GAAGGUGGUCCCUGCAGAG | 2304 | 4539 | CUCUGCAGGGACCACCUUC | 2599 |
| 4539 | GGGGCUCCAGGCUGGUGAG | 2305 | 4539 | GGGGCUCCAGGCUGGUGAG | 2305 | 4557 | CUCACCAGCCUGGAGCCCC | 2600 |
| 4557 | GAGCCCCCCUGCUGUCAGG | 2306 | 4557 | GAGCCCCCCUGCUGUCAGG | 2306 | 4575 | CCUGACAGCAGGGGGGCUC | 2601 |
| 4575 | GACCAGAUUUUCCCAGCCA | 2307 | 4575 | GACCAGAUUUUCCCAGCCA | 2307 | 4593 | UGGCUGGGAAAAUCUGGUC | 2602 |
| 4593 | AUCCAGCAUGCUGCGGGGA | 2308 | 4593 | AUCCAGCAUGCUGCGGGGA | 2308 | 4611 | UCCCCGCAGCAUGCUGGAU | 2603 |
| 4611 | AGAAGGGGCAGAGGCUCAC | 2309 | 4611 | AGAAGGGGCAGAGGCUCAC | 2309 | 4629 | GUGAGCCUCUGCCCCUUCU | 2604 |
| 4629 | CCUCCCUCCUGGGGCCUUU | 2310 | 4629 | CCUCCCUCCUGGGGCCUUU | 2310 | 4647 | AAAGGCCCCAGGAGGGAGG | 2605 |
| 4647 | UUGUUUUGGAUCCUGGGGA | 2311 | 4647 | UUGUUUUGGAUCCUGGGGA | 2311 | 4665 | UCCCCAGGAUCCAAAACAA | 2606 |
| 4665 | AUGGUGAGAAUGGAGGUUC | 2312 | 4665 | AUGGUGAGAAUGGAGGUUC | 2312 | 4683 | GAACCUCCAUUCUCACCAU | 2607 |
| 4683 | CUAGAAGGGGUAAGGCCAG | 2313 | 4683 | CUAGAAGGGGUAAGGCCAG | 2313 | 4701 | CUGGCCUUACCCCUUCUAG | 2608 |
| 4701 | GAACCCAGGGAUCCAGGAG | 2314 | 4701 | GAACCCAGGGAUCCAGGAG | 2314 | 4719 | CUCCUGGAUCCCUGGGUUC | 2609 |
| 4719 | GUCGGCUCUCAGCUGGAGC | 2315 | 4719 | GUCGGCUCUCAGCUGGAGC | 2315 | 4737 | GCUCCAGCUGAGAGCCGAC | 2610 |
| 4737 | CUUCCAUACCUUCUGGGCU | 2316 | 4737 | CUUCCAUACCUUCUGGGCU | 2316 | 4755 | AGCCCAGAAGGUAUGGAAG | 2611 |
| 4755 | UCCCUUUGCUGACCACCAG | 2317 | 4755 | UCCCUUUGCUGACCACCAG | 2317 | 4773 | CUGGUGGUCAGCAAAGGGA | 2612 |
| 4773 | GCCCAAGGGAGCUAAGACC | 2318 | 4773 | GCCCAAGGGAGCUAAGACC | 2318 | 4791 | GGUCUUAGCUCCCUUGGGC | 2613 |
| 4791 | CAGGAGGGGGCUGGGCGCU | 2319 | 4791 | CAGGAGGGGGCUGGGCGCU | 2319 | 4809 | AGCGCCCAGCCCCCUCCUG | 2614 |
| 4809 | UGUCCCUUCUCUUUCCCAG | 2320 | 4809 | UGUCCCUUCUCUUUCCCAG | 2320 | 4827 | CUGGGAAAGAGAAGGGACA | 2615 |
| 4827 | GGAGCCCUGCCAGGGGCUG | 2321 | 4827 | GGAGCCCUGCCAGGGGCUG | 2321 | 4845 | CAGCCCCUGGCAGGGCUCC | 2616 |
| 4845 | GUGGGCCUACAAGGCUUCC | 2322 | 4845 | GUGGGCCUACAAGGCUUCC | 2322 | 4863 | GGAAGCCUUGUAGGCCCAC | 2617 |
| 4863 | CAGGGGAUGCCAUCCAGCC | 2323 | 4863 | CAGGGGAUGCCAUCCAGCC | 2323 | 4881 | GGCUGGAUGGCAUCCCCUG | 2618 |
| 4881 | CUGUAGGAAACCAAAGAUG | 2324 | 4881 | CUGUAGGAAACCAAAGAUG | 2324 | 4899 | CAUCUUUGGUUUCCUACAG | 2619 |
| 4899 | GGGAAGUGGCUCCUAGGGG | 2325 | 4899 | GGGAAGUGGCUCCUAGGGG | 2325 | 4917 | CCCCUAGGAGCCACUUCCG | 2620 |
| 4917 | GGCUGACUCUUCCUUCCUC | 2326 | 4917 | GGCUGAGUCUUCCUUCCUC | 2326 | 4935 | GAGGAAGGAAGAGUCAGCC | 2621 |
| 4935 | CCUCCUCCCCAGUACCACA | 2327 | 4935 | CCUCCUCCCCAGUACCACA | 2327 | 4953 | UGUGGUACUGGGGAGGAGG | 2622 |
| 4953 | AUAUACUUUCUCUCCUUCU | 2328 | 4953 | AUAUACUUUCUCUCCUUCU | 2328 | 4971 | AGAAGGAGAGAAAGUAUAU | 2623 |
| 4971 | UAUCUCCAGGGCCCCACCA | 2329 | 4971 | UAUCUCCAGGGCCCCACCA | 2329 | 4989 | UGGUGGGGCCCUGGAGAUA | 2624 |
| 4989 | AAUCUGUUUACAUAUUUAU | 2330 | 4989 | AAUCUGUUUACAUAUUUAU | 2330 | 5007 | AUAAAUAUGUAAACAGAUU | 2625 |
| 5007 | UUAUCCUAUGGGGGCCUGA | 2331 | 5007 | UUAUCCUAUGGGGGCCUGA | 2331 | 5025 | UCAGGCCCCCAUAGGAUAA | 2626 |
| 5025 | AGCAGGAUUGAGGGAGCCA | 2332 | 5025 | AGCAGGAUUGAGGGAGCCA | 2332 | 5043 | UGGCUCCCUCAAUCCUGCU | 2627 |
| 5043 | AGGGGAGGGGCAGGAGUCC | 2333 | 5043 | AGGGGAGGGGCAGGAGUCC | 2333 | 5061 | GGACUCCUGCCCCUCCCCU | 2628 |
| 5061 | CCAGCACCAUCGGUUCAUA | 2334 | 5061 | CCAGCACCAUCGGUUCAUA | 2334 | 5079 | UAUGAACCGAUGGUGCUGG | 2629 |
| 5079 | AGUGUGCUUGUGUGUUUGU | 2335 | 5079 | AGUGUGCUUGUGUGUUUGU | 2335 | 5097 | ACAAACACACAAGCACACU | 2630 |
| 5097 | UUUUAGAUCCUCCUGGGGG | 2336 | 5097 | UUUUAGAUCCUCCUGGGGG | 2336 | 5115 | CCCCCAGGAGGAUCUAAAA | 2631 |
| 5115 | GAUGGGGAUGGGGCCAGGC | 2337 | 5115 | GAUGGGGAUGGGGCCAGGC | 2337 | 5133 | GCCUGGCCCCAUCCCCAUC | 2632 |
| 5133 | CUCAGUGUACUAGGCCUCU | 2338 | 5133 | CUCAGUGUACUAGGCCUCU | 2338 | 5151 | AGAGGCCUAGUACACUGAG | 2633 |
| 5151 | UCUGUGCUGAGCCCCAGGC | 2339 | 5151 | UCUGUGCUGAGCCCCAGGC | 2339 | 5169 | GCCUGGGGCUCAGCACAGA | 2634 |
| 5169 | CUCCCGGCCCCUUACCCAC | 2340 | 5169 | CUCCCGGCCCCUUACCCAC | 2340 | 5187 | GUGGGUAAGGGGCCGGGAG | 2635 |
| 5187 | CUCUCUCCCUGUGGCUGGU | 2341 | 5187 | CUCUCUCCCUGUGGCUGGU | 2341 | 5205 | ACCAGCCACAGGGAGAGAG | 2636 |
| 5205 | UCUGGUUCUCAUGUAAACC | 2342 | 5205 | UCUGGUUCUCAUGUAAACC | 2342 | 5223 | GGUUUACAUGAGAACCAGA | 2637 |
| 5223 | CCACUCCUUGCUUUGUCUC | 2343 | 5223 | CCACUCCUUGCUUUGUCUC | 2343 | 5241 | GAGACAAAGCAAGGAGUGG | 2638 |
| 5241 | CCCUGGAUAUGGAUUUCAG | 2344 | 5241 | CCCUGGAUAUGGAUUUCAG | 2344 | 5259 | CUGAAAUCCAUAUCCAGGG | 2639 |
| 5259 | GUUAAGUAUUUUGUAACCC | 2345 | 5259 | GUUAAGUAUUUUGUAACCC | 2345 | 5277 | GGGUUACAAAAUACUUAAC | 2640 |
| 5277 | CGUUACACUGUGUGUCCUU | 2346 | 5277 | CGUUACACUGUGUGUCCUU | 2346 | 5295 | AAGGACACACAGUGUAACG | 2641 |
| 5295 | UGUGUAAAUAAACUUGUUU | 2347 | 5295 | UGUGUAAAUAAACUUGUUU | 2347 | 5313 | AAACAAGUUUAUUUACACA | 2642 |

HDAC6: NM_006044.2

| | | | | | | | | |
|---|---|---|---|---|---|---|---|---|
| 3 | GCAGUCCCCUGAGGAGCGG | 2755 | 3 | GGAGUCCCCUGAGGAGCGG | 2755 | 21 | CCGCUCCUCAGGGGACUGC | 2982 |
| 21 | GGGCUGGUUGAAACGCUAG | 2756 | 21 | GGGCUGGUUGAAACGCUAG | 2756 | 39 | CUAGCGUUUCAACCAGCCC | 2983 |
| 39 | GGGGCGGGAUCUGGCGGAG | 2757 | 39 | GGGGCGGGAUCUGGCGGAG | 2757 | 57 | CUCCGCCAGAUCCCGCCCC | 2984 |
| 57 | GUGGAAGAACCGCGGCAGG | 2758 | 57 | GUGGAAGAACGGCGGCAGG | 2758 | 75 | CCUGCCGCGGUUGUUCCAC | 2985 |
| 75 | GGGCCAAGCCUCCUCAACU | 2759 | 75 | GGGCCAAGCCUCCUCAACU | 2759 | 93 | AGUUGAGGAGGCUUGGCCC | 2986 |
| 93 | UAUGACCUCAACCGGCCAG | 2760 | 93 | UAUGACCUCAACCGGCCAG | 2760 | 111 | CUGGCCGGUUGAGGUCAUA | 2987 |
| 111 | GGAUUCCACCACAACCAGG | 2761 | 111 | GGAUUCCACCACAACCAGG | 2761 | 129 | CCUGGUUGUGGUGGAAUCC | 2988 |
| 129 | GCAGCGAAGAAGUAGGCAG | 2762 | 129 | GCAGCGAAGAAGUAGGCAG | 2762 | 147 | CUGCCUACUUCUUCGCUGC | 2989 |
| 147 | GAACCCCCAGUCGCCCCCU | 2763 | 147 | GAACCCCCAGUCGCCCCCU | 2763 | 165 | AGGGGGCGACUGGGGGUUC | 2990 |
| 165 | UCAGGACUCCAGUGUCACU | 2764 | 165 | UCAGGACUCCAGUGUCACU | 2764 | 183 | AGUGACACUGGAGUCCUGA | 2991 |
| 183 | UUCGAAGCGAAAUAUUAAA | 2765 | 183 | UUCGAAGCGAAAUAUUAAA | 2765 | 201 | UUUAAUAUUUCGCUUCGAA | 2992 |
| 201 | AAAGGGAGCCGUUCCCCGC | 2766 | 201 | AAAGGGAGCCGUUCCCCGC | 2766 | 219 | GCGGGGAACGGCUCCCUUU | 2993 |
| 219 | CUCUAUCCCCAAUCUAGCG | 2767 | 219 | CUCUAUCCCCAAUCUAGCG | 2767 | 237 | CGCUAGAUUGGGGAUAGAG | 2994 |
| 237 | GGAGGUAAAGAAGAAAGGC | 2768 | 237 | GGAGGUAAAGAAGAAAGGC | 2768 | 255 | GCCUUUCUUCUUUACCUCC | 2995 |
| 255 | CAAAAUGAAGAAGCUCGGC | 2769 | 255 | CAAAAUGAAGAAGCUCGGC | 2769 | 273 | GCCGAGCUUCUUCAUUUUG | 2996 |
| 273 | CCAAGCAAUGGAAGAAGAC | 2770 | 273 | CCAAGCAAUGGAAGAAGAC | 2770 | 291 | GUCUUCUUCCAUUGCUUGG | 2997 |
| 291 | CCUAAUCGUGGGACUGCAA | 2771 | 291 | CCUAAUCGUGGGACUGCAA | 2771 | 309 | UUGCAGUCCCACGAUUAGG | 2998 |
| 309 | AGGGAUGGAUCUGAACCUU | 2772 | 309 | AGGGAUGGAUCUGAACCUU | 2772 | 327 | AAGGUUCAGAUCCAUCCCU | 2999 |
| 327 | UGAGGCUGAAGCACUGGCU | 2773 | 327 | UGAGGCUGAAGCACUGGCU | 2773 | 345 | AGCCAGUGCUUCAGCCUCA | 3000 |
| 345 | UGGCACUGGCUUGGUGUUG | 2774 | 345 | UGGCACUGGCUUGGUGUUG | 2774 | 363 | CAACACCAAGCCAGUGCCA | 3001 |
| 363 | GGAUGAGCAGUUAAAUGAA | 2775 | 363 | GGAUGAGCAGUUAAAUGAA | 2775 | 381 | UUCAUUUAACUGCUCAUCC | 3002 |
| 381 | AUUCCAUUGCCUCUGGGAU | 2776 | 381 | AUUCCAUUGCCUCUGGGAU | 2776 | 399 | AUCCCAGAGGCAAUGGAAU | 3003 |
| 399 | UGACAGCUUCCCGGAAGGC | 2777 | 399 | UGACAGCUUCCCGGAAGGC | 2777 | 417 | GCCUUCCGGGAAGCUGUCA | 3004 |
| 417 | CCCUGAGCGGCUCCAUGCC | 2778 | 417 | CCCUGAGCGGCUCCAUGCC | 2778 | 435 | GGCAUGGAGCCGCUCAGGG | 3005 |
| 435 | CAUCAAGGAGCAACUGAUC | 2779 | 435 | CAUCAAGGAGCAACUGAUC | 2779 | 453 | GAUCAGUUGCUCCUUGAUG | 3006 |
| 453 | CCAGGAGGGCCUCCUAGAU | 2780 | 453 | CCAGGAGGGCCUCCUAGAU | 2780 | 471 | AUCUAGGAGGCCCUCCUGG | 3007 |
| 471 | UCGCUGCGUGUCCUUUCAG | 2781 | 471 | UCGCUGCGUGUCCUUUCAG | 2781 | 489 | CUGAAAGGACACGCAGCGA | 3008 |
| 489 | GGCCCGGUUUGCUGAAAAG | 2782 | 489 | GGCCCGGUUUGCUGAAAAG | 2782 | 507 | CUUUUCAGCAAACCGGGCC | 3009 |
| 507 | GGAAGAGCUGAUGUUGGUU | 2783 | 507 | GGAAGAGCUGAUGUUGGUU | 2783 | 525 | AACCAACAUCAGCUCUUCC | 3010 |
| 525 | UCACAGCCUAGAAUAUAUU | 2784 | 525 | UCACAGCCUAGAAUAUAUU | 2784 | 543 | AAUAUAUUCUAGGCUGUGA | 3011 |
| 543 | UGAUCUGAUGGAAACAACC | 2785 | 543 | UGAUCUGAUGGAAACAACC | 2785 | 561 | GGUUGUUUCCAUCAGAUCA | 3012 |
| 561 | CCAGUACAUGAAUGAGGGA | 2786 | 561 | CCAGUACAUGAAUGAGGGA | 2786 | 579 | UCCCUCAUUCAUGUACUGG | 3013 |
| 579 | AGAACUCCGUGUCCUAGCA | 2787 | 579 | AGAACUCCGUGUCCUAGCA | 2787 | 597 | UGCUAGGACACGGAGUUCU | 3014 |
| 597 | AGACACCUACGACUCAGUU | 2788 | 597 | AGACACCUACGACUCAGUU | 2788 | 615 | AACUGAGUCGUAGGUGUCU | 3015 |
| 615 | UUAUCUGCAUCCGAACUCA | 2789 | 615 | UUAUCUGCAUCCGAACUCA | 2789 | 633 | UGAGUUCGGAUGCAGAUAA | 3016 |
| 633 | AUACUCCUGUGGCUGCCUG | 2790 | 633 | AUACUCCUGUGCCUGCCUG | 2790 | 651 | CAGGCAGGCACAGGAGUAU | 3017 |
| 651 | GGCCUCAGGCUCUGUCGUC | 2791 | 651 | GGCCUCAGGCUCUGUCCUC | 2791 | 669 | GAGGACAGAGCCUGAGGCC | 3018 |
| 669 | CAGGCUGGUGGAUGCGGUC | 2792 | 669 | CAGGCUGGUGGAUGCGGUC | 2792 | 687 | GACCGCAUCCACCAGCCUG | 3019 |
| 687 | CCUGGGGGCUGAGAUCCGG | 2793 | 687 | CCUGGGGGCUGAGAUCCGG | 2793 | 705 | CCGGAUCUCAGCCCCCAGG | 3020 |
| 705 | GAAUGGCAUGGCCAUCAUU | 2794 | 705 | GAAUGGCAUGGCCAUCAUU | 2794 | 723 | AAUGAUGGCCAUGCGAUUC | 3021 |
| 723 | UAGGCCUCCUGGACAUCAC | 2795 | 723 | UAGGCCUCCUGGACAUCAC | 2795 | 741 | GUGAUGUCCAGGAGGCCUA | 3022 |
| 741 | CGCCCAGCACAGUCUUAUG | 2796 | 741 | CGCCCAGCACAGUCUUAUG | 2796 | 759 | CAUAAGACUGUGCUGGGCG | 3023 |
| 759 | GGAUGGCUAUUGCAUGUUC | 2797 | 759 | GGAUGGCUAUUGCAUGUUC | 2797 | 777 | GAACAUGCAAUAGCCAUCC | 3024 |
| 777 | CAACCACGUGGCUGUGGCA | 2798 | 777 | CAACCACGUGGCUGUGGCA | 2798 | 795 | UGCCACAGCCACGUGGUUG | 3025 |
| 795 | AGCCCGCUAUGCUCAACAG | 2799 | 795 | AGCCCGCUAUGCUCAACAG | 2799 | 813 | CUGUUGAGCAUAGCGGGCU | 3026 |
| 813 | GAAACACCGCAUCCGGAGG | 2800 | 813 | GAAACACCGCAUCCGGAGG | 2800 | 831 | CCUCCGGAUGCGGUGUUUC | 3027 |
| 831 | GGUCCUUAUCGUAGAUUGG | 2801 | 831 | GGUCCUUAUCGUAGAUUGG | 2801 | 849 | CCAAUCUACGAUAAGGACC | 3028 |
| 849 | GGAUGUGCACCACGGUCAA | 2802 | 849 | GGAUGUGCACCACGGUCAA | 2802 | 867 | UUGACCGUGGUGCACAUCC | 3029 |
| 867 | AGGAACACAGUUCACCUUC | 2803 | 867 | AGGAACACAGUUCACCUUC | 2803 | 885 | GAAGGUGAACUGUGUUCCU | 3030 |
| 885 | CGACCAGGACCCCAGUGUC | 2804 | 885 | CGACCAGGACCCCAGUGUC | 2804 | 903 | GACACUGGGGUCCUGGUCG | 3031 |
| 903 | CCUCUAUUUCUCCAUCCAC | 2805 | 903 | CCUCUAUUUCUCCAUCCAC | 2805 | 921 | GUGGAUGGAGAAAUAGAGG | 3032 |
| 921 | CCGCUACGAGCAGGGUAGG | 2806 | 921 | CCGCUACGAGCAGGGUAGG | 2806 | 939 | CCUACCCUGCUCGUAGCGG | 3033 |
| 939 | GUUCUGGGCCCACCUGAAG | 2807 | 939 | GUUCUGGCCCCACCUGAAG | 2807 | 957 | CUUCAGGUGGGGCCAGAAC | 3034 |
| 957 | GGCCUCUAACUGGUCCACC | 2808 | 957 | GGCCUCUAACUGGUCCACC | 2808 | 975 | GGUGGACCAGUUAGAGGCC | 3035 |
| 975 | CACAGGUUUCGGCCAAGGC | 2809 | 975 | CACAGGUUUCGGCCAAGGC | 2809 | 993 | GCCUUGGCCGAAACCUGUG | 3036 |
| 993 | CCAAGGAUAUACCAUCAAU | 2810 | 993 | CCAAGGAUAUACCAUCAAU | 2810 | 1011 | AUUGAUGGUAUAUCCUUGG | 3037 |
| 1011 | UGUGCCUUGGAACCAGGUG | 2811 | 1011 | UGUGCCUUGGAACCAGGUG | 2811 | 1029 | CACCUGGUUCCAAGGCACA | 3038 |
| 1029 | GGGGAUGCGGGAUGCUGAC | 2812 | 1029 | GGGGAUGCGGGAUGCUGAC | 2812 | 1047 | GUCAGCAUCCCGCAUCCCC | 3039 |
| 1047 | CUACAUUGCUGCUUUCCUG | 2813 | 1047 | CUACAUUGCUGCUUUCCUG | 2813 | 1065 | CAGGAAAGCAGCAAUGUAG | 3040 |
| 1065 | GCACGUCCUGCUGCCAGUC | 2814 | 1065 | GCACGUCCUGCUGCCAGUC | 2814 | 1083 | GACUGGCAGCAGGACGUGC | 3041 |
| 1083 | CGCCCUCGAGUUCCAGCCU | 2815 | 1083 | CGCCCUCGAGUUCCAGCCU | 2815 | 1101 | AGGCUGGAACUCGAGGGCG | 3042 |
| 1101 | UCAGCUGGUCCUGGUGGCU | 2816 | 1101 | UCAGCUGGUCCUGGUGGCU | 2816 | 1119 | AGCCACCAGGACCAGCUGA | 3043 |
| 1119 | UGCUGGAUUUGAUGCCCUG | 2817 | 1119 | UGCUGGAUUUGAUGCCCUG | 2817 | 1137 | CAGGGCAUCAAAUCCAGCA | 3044 |
| 1137 | GCAAGGGGACCCCAAGGGU | 2818 | 1137 | GCAAGGGGACCCCAAGGGU | 2818 | 1155 | ACCCUUGGGGUCCCCUUGC | 3045 |
| 1155 | UGAGAUGGCCGCCACUCCG | 2819 | 1155 | UGAGAUGGCCGCCACUCCG | 2819 | 1173 | CGGAGUGGCGGCCAUCUCA | 3046 |
| 1173 | GGCAGGGUUCGCCCAGCUA | 2820 | 1173 | GGCAGGGUUCGCCCAGCUA | 2820 | 1191 | UAGCUGGGCGAACCCUGCC | 3047 |
| 1191 | AACCCACCUGCUCAUGGGU | 2821 | 1191 | AACCCACCUGCUCAUGGGU | 2821 | 1209 | ACCCAUGAGCAGGUGGGUU | 3048 |
| 1209 | UCUGGCAGGAGGCAAGCUG | 2822 | 1209 | UCUGGCAGGAGGCAAGCUG | 2822 | 1227 | CAGCUUGCCUCCUGCCAGA | 3049 |
| 1227 | GAUCCUGUCUCUGGAGGGU | 2823 | 1227 | GAUCCUGUCUCUGGAGGGU | 2823 | 1245 | ACCCUCCAGAGACAGGAUC | 3050 |
| 1245 | UGGCUACAACCUCCGCGCC | 2824 | 1245 | UGGCUACAACCUCCGCGCC | 2824 | 1263 | GGCGCGGAGGUUGUAGCCA | 3051 |
| 1263 | CCUGGCUGAAGGCGUCAGU | 2825 | 1263 | CCUGGCUGAAGGCGUCAGU | 2825 | 1281 | ACUGACGCCUUCAGCCAGG | 3052 |
| 1281 | UGCUUCGCUCCACACCCUU | 2826 | 1281 | UGCUUCGCUCCACACCCUU | 2826 | 1299 | AAGGGUGUGGAGCGAAGCA | 3053 |
| 1299 | UCUGGGAGACCCUUGCCCC | 2827 | 1299 | UCUGGGAGACCCUUGCCCC | 2827 | 1317 | GGGGCAAGGGUCUCCCAGA | 3054 |
| 1317 | CAUGCUGGAGUCACCUGGU | 2828 | 1317 | CAUGGUGGAGUCACCUGGU | 2828 | 1335 | ACCAGGUGACUCCAGGAUG | 3055 |
| 1335 | UGCCCCCUGCCGGAGUGCC | 2829 | 1335 | UGCCCCCUGCCGGAGUGCC | 2829 | 1353 | GGCACUCCGGCAGGGGGCA | 3056 |
| 1353 | CCAGGCUUCAGUUUCCUGU | 2830 | 1353 | CCAGGCUUCAGUUUCCUGU | 2830 | 1371 | ACAGGAAACUGAAGCCUGG | 3057 |
| 1371 | UGCUCUGGAAGCCCUUGAG | 2831 | 1371 | UGCUCUGGAAGCCCUUGAG | 2831 | 1389 | CUCAAGGGCUUCCAGAGCA | 3058 |
| 1389 | GCCCUUCUGGGAGGUUCUU | 2832 | 1389 | GCCCUUCUGGGAGGUUCUU | 2832 | 1407 | AAGAACCUCCCAGAAGGGC | 3059 |
| 1407 | UGUGAGAUCAACUGAGACC | 2833 | 1407 | UGUGAGAUCAACUGAGACC | 2833 | 1425 | GGUCUCAGUUGAUCUCACA | 3060 |
| 1425 | CGUGGAGAGGGACAACAUG | 2834 | 1425 | CGUGGAGAGGGACAACAUG | 2834 | 1443 | CAUGUUGUCCCUCUCCACG | 3061 |
| 1443 | GGAGGAGGACAAUGUAGAG | 2835 | 1443 | GGAGGAGGACAAUGUAGAG | 2835 | 1461 | CUCUACAUUGUCCUCCUCC | 3062 |
| 1461 | GGAGAGCGAGGAGGAAGGA | 2836 | 1461 | GGAGAGCGAGGAGGAAGGA | 2836 | 1479 | UCCUUCCUCCUCGCUCUCC | 3063 |
| 1479 | ACCCUGGGAGCCCCCUGUG | 2837 | 1479 | ACCCUGGGAGCCCCCUGUG | 2837 | 1497 | CACAGGGGGCUCCCAGGGU | 3064 |
| 1497 | GCUCCCAAUCCUGACAUGG | 2838 | 1497 | GCUCCCAAUCCUGACAUGG | 2838 | 1515 | CCAUGUCAGGAUUGGGAGC | 3065 |
| 1515 | GCCAGUGCUACAGUCUCGC | 2839 | 1515 | GCCAGUGCUACAGUCUCGC | 2839 | 1533 | GCGAGACUGUAGCACUGGC | 3066 |
| 1533 | CACAGGGCUGGUCUAUGAC | 2840 | 1533 | CACAGGGCUGGUCUAUGAC | 2840 | 1551 | GUCAUAGACCAGCCCUGUG | 3067 |
| 1551 | CCAAAAUAUGAUGAAUCAC | 2841 | 1551 | CCAAAAUAUGAUGAAUCAC | 2841 | 1569 | GUGAUUCAUCAUAUUUUGG | 3068 |
| 1569 | CUGCAACUUGUGGGACAGC | 2842 | 1569 | CUGCAACUUGUGGGACAGC | 2842 | 1587 | GCUGUCCCACAAGUUGCAG | 3069 |
| 1587 | CCACCACCCUGAGGUACCC | 2843 | 1587 | CCACCACCCUGAGGUACCC | 2843 | 1605 | GGGUACCUCAGGGUGGUGG | 3070 |
| 1605 | CCAGCGCAUCUUGCGGAUC | 2844 | 1605 | CCAGCGCAUCUUGCGGAUC | 2844 | 1623 | GAUCCGCAAGAUGCGCUGG | 3071 |
| 1623 | CAUGUGCCGUCUGGAGGAG | 2845 | 1623 | CAUGUGCCGUCUGGAGGAG | 2845 | 1641 | CUCCUCCAGACGGCACAUG | 3072 |
| 1641 | GCUGGGCCUUGCCGGGCGC | 2846 | 1641 | GCUGGGCCUUGCCGGGCGC | 2846 | 1659 | GCGCCCGGCAAGGCCCAGC | 3073 |
| 1659 | CUGCCUCACCCUGACACCG | 2847 | 1659 | CUGCCUCACCCUGACACCG | 2847 | 1677 | CGGUGUCAGGGUGAGGCAG | 3074 |
| 1677 | GCGCCCUGCCACAGAGGCU | 2848 | 1677 | GCGCCCUGCCACAGAGGCU | 2848 | 1695 | AGCCUCUGUGGCAGGGCGC | 3075 |
| 1695 | UGAGCUGCUCACCUGUCAC | 2849 | 1695 | UGAGCUGCUCACCUGUCAC | 2849 | 1713 | GUGACAGGUGAGCAGCUCA | 3076 |
| 1713 | CAGUGCUGAGUACGUGGGU | 2850 | 1713 | CAGUGCUGAGUACGUGGGU | 2850 | 1731 | ACCCACGUACUCAGCACUG | 3077 |
| 1731 | UCAUCUCCGGGCCACAGAG | 2851 | 1731 | UCAUCUCCGGGCCACAGAG | 2851 | 1749 | CUCUGUGGCCCGGAGAUGA | 3078 |
| 1749 | GAAAAUGAAAACCCGGGAG | 2852 | 1749 | GAAAAUGAAAACCCGGGAG | 2852 | 1767 | CUCCCGGGUUUUCAUUUUC | 3079 |
| 1767 | GCUGCACCGUGAGAGUUCC | 2853 | 1767 | GCUGCACCGUGAGAGUUCC | 2853 | 1785 | GGAACUCUCACGGUGCAGC | 3080 |
| 1785 | CAACUUUGACUCCAUCUAU | 2854 | 1785 | CAACUUUGACUCCAUCUAU | 2854 | 1803 | AUAGAUGGAGUCAAAGUUG | 3081 |
| 1803 | UAUCUGCCCCAGUACCUUC | 2855 | 1803 | UAUCUGCCCCAGUACCUUC | 2855 | 1821 | GAAGGUACUGGGGCAGAUA | 3082 |
| 1821 | CGCCUGUGCACAGCUUGCC | 2856 | 1821 | CGCCUGUGCACAGCUUGCC | 2856 | 1839 | GGCAAGCUGUGCACAGGCG | 3083 |
| 1839 | CACUGGCGCUGCCUGCCGC | 2857 | 1839 | CACUGGCGCUGCCUGCCGC | 2857 | 1857 | GCGGCAGGCAGCGCCAGUG | 3084 |
| 1857 | CCUGGUGGAGGCUGUGCUC | 2858 | 1857 | CCUGGUGGAGGCUGUGCUC | 2858 | 1875 | GAGCACAGCCUCCACCAGG | 3085 |
| 1875 | CUCAGGAGAGGUUCUGAAU | 2859 | 1875 | CUCAGGAGAGGUUCUGAAU | 2859 | 1893 | AUUCAGAACCUCUCCUGAG | 3086 |
| 1893 | UGGUGCUGCUGUGGUGCGU | 2860 | 1893 | UGGUGCUGCUGUGGUGCGU | 2860 | 1911 | ACGCACCACAGCAGCACCA | 3087 |
| 1911 | UCCCCCAGGACACCACGCA | 2861 | 1911 | UCCCCCAGGACACCACGCA | 2861 | 1929 | UGCGUGGUGUCCUGGGGGA | 3088 |
| 1929 | AGAGCAGGAUGCAGCUUGC | 2862 | 1929 | AGAGCAGGAUGCAGCUUGC | 2862 | 1947 | GCAAGCUGCAUCCUGCUCU | 3089 |
| 1947 | CGGUUUUUGCUUUUUCAAC | 2863 | 1947 | CGGUUUUUGCUUUUUCAAC | 2863 | 1965 | GUUGAAAAAGCAAAAACCG | 3090 |
| 1965 | CUCUGUGGCUGUGGCUGCU | 2864 | 1965 | CUCUGUGGCUGUGGCUGCU | 2864 | 1983 | AGCAGCCACAGCCACAGAG | 3091 |
| 1983 | UCGCCAUGCCCAGACUAUC | 2865 | 1983 | UCGCCAUGCCCAGACUAUC | 2865 | 2001 | GAUAGUCUGGGCAUGGCGA | 3092 |
| 2001 | CAGUGGGCAUGCCCUACGG | 2866 | 2001 | CAGUGGGCAUGCCCUACGG | 2866 | 2019 | CCGUAGGGCAUGCCCACUG | 3093 |
| 2019 | GAUCCUGAUUGUGGAUUGG | 2867 | 2019 | GAUCCUGAUUGUGGAUUGG | 2867 | 2037 | CCAAUCCACAAUCAGGAUC | 3094 |
| 2037 | GGAUGUCCACCACGGUAAU | 2868 | 2037 | GGAUGUCCACCACGGUAAU | 2868 | 2055 | AUUACCGUGGUGGACAUCC | 3095 |
| 2055 | UGGAACUCAGCACAUGUUU | 2869 | 2055 | UGGAACUCAGCACAUGUUU | 2869 | 2073 | AAACAUGUGCUGAGUUCCA | 3096 |
| 2073 | UGAGGAUGACCCCAGUGUG | 2870 | 2073 | UGAGGAUGACCCCAGUGUG | 2870 | 2091 | CACACUGGGGUCAUCCUCA | 3097 |
| 2091 | GCUAUAUGUGUCCCUGCAC | 2871 | 2091 | GCUAUAUGUGUCCCUGCAC | 2871 | 2109 | GUGCAGGGACACAUAUAGC | 3098 |
| 2109 | CCGCUAUGAUCAUGGCACC | 2872 | 2109 | CCGCUAUGAUCAUGGCACC | 2872 | 2127 | GGUGCCAUGAUCAUAGCGG | 3099 |
| 2127 | CUUCUUCCCCAUGGGGGAU | 2873 | 2127 | CUUCUUCCCCAUGGGGGAU | 2873 | 2145 | AUCCCCCAUGGGGAAGAAG | 3100 |
| 2145 | UGAGGGUGCCAGCAGCCAG | 2874 | 2145 | UGAGGGUGCCAGCAGCCAG | 2874 | 2163 | CUGGCUGCUGGCACCCUCA | 3101 |
| 2163 | GAUCGGCCGGGCUGCGGGC | 2875 | 2163 | GAUCGGCCGGGCUGCGGGC | 2875 | 2181 | GCCCGCAGCCCGGCCGAUC | 3102 |
| 2181 | CACAGGCUUCACCGUCAAC | 2876 | 2181 | CACAGGCUUCACCGUCAAC | 2876 | 2199 | GUUGACGGUGAAGCCUGUG | 3103 |
| 2199 | CGUGGCAUGGAACGGGCCC | 2877 | 2199 | CGUGGCAUGGAACGGGCCC | 2877 | 2217 | GGGCCCGUUCCAUGCCACG | 3104 |
| 2217 | CCGCAUGGGUGAUGCUGAC | 2878 | 2217 | CCGCAUGGGUGAUGCUGAC | 2878 | 2235 | GUCAGCAUCACCCAUGCGG | 3105 |
| 2235 | CUACCUAGCUGCCUGGCAU | 2879 | 2235 | CUACCUAGCUGCCUGGCAU | 2879 | 2253 | AUGCCAGGCAGCUAGGUAG | 3106 |
| 2253 | UCGCCUGGUGCUUCCCAUU | 2880 | 2253 | UCGCCUGGUGCUUCCCAUU | 2880 | 2271 | AAUGGGAAGCACCAGGCGA | 3107 |
| 2271 | UGCCUACGAGUUUAACCCA | 2881 | 2271 | UGCCUACGAGUUUAACCCA | 2881 | 2289 | UGGGUUAAACUCGUAGGCA | 3108 |
| 2289 | AGAACUGGUGCUGGUCUCA | 2882 | 2289 | AGAACUGGUGCUGGUCUCA | 2882 | 2307 | UGAGACCAGCACCAGUUCU | 3109 |
| 2307 | AGCUGGCUUUGAUGCUGCA | 2883 | 2307 | AGCUGGCUUUGAUGCUGCA | 2883 | 2325 | UGCAGCAUCAAAGCCAGCU | 3110 |
| 2325 | ACGGGGGGAUCCGCUGGGG | 2884 | 2325 | ACGGGGGGAUCCGCUGGGG | 2884 | 2343 | CCCCAGCGGAUCCCCCCGU | 3111 |
| 2343 | GGGCUGCCAGGUGUCACCU | 2885 | 2343 | GGGCUGCCAGGUGUCACCU | 2885 | 2361 | AGGUGACACCUGGCAGCCC | 3112 |
| 2361 | UGAGGGUUAUGCCCACCUC | 2886 | 2361 | UGAGGGUUAUGCCCACCUC | 2886 | 2379 | GAGGUGGGCAUAACCCUCA | 3113 |
| 2379 | CACCCACCUGCUGAUGGGC | 2887 | 2379 | CACCCACCUGCUGAUGGGC | 2887 | 2397 | GCCCAUCAGCAGGUGGGUG | 3114 |
| 2397 | CCUUGCCAGUGGCCGCAUU | 2888 | 2397 | CCUUGCCAGUGGCCGCAUU | 2888 | 2415 | AAUGCGGCCACUGGCAAGG | 3115 |
| 2415 | UAUCCUUAUCCUAGAGGGU | 2889 | 2415 | UAUCCUUAUCCUAGAGGGU | 2889 | 2433 | ACCCUCUAGGAUAAGGAUA | 3116 |
| 2433 | UGGCUAUAACCUGACAUCC | 2890 | 2433 | UGGCUAUAACCUGACAUCC | 2890 | 2451 | GGAUGUCAGGUUAUAGCCA | 3117 |
| 2451 | CAUCUCAGAGUCCAUGGCU | 2891 | 2451 | CAUCUCAGAGUCCAUGGCU | 2891 | 2469 | AGCCAUGGACUCUGAGAUG | 3118 |
| 2469 | UGCCUGCACUCGCUCCCUC | 2892 | 2469 | UGCCUGCACUCGCUCCCUC | 2892 | 2487 | GAGGGAGCGAGUGCAGGCA | 3119 |
| 2487 | CCUUGGAGACCGACCACCC | 2893 | 2487 | CCUUGGAGACCCACCACCC | 2893 | 2505 | GGGUGGUGGGUCUCCAAGG | 3120 |
| 2505 | CCUGCUGACCCUGCCACGG | 2894 | 2505 | CCUGCUGACCCUGCCACGG | 2894 | 2523 | CCGUGGCAGGGUCAGCAGG | 3121 |
| 2523 | GCCCCCACUAUCAGGGGCC | 2895 | 2523 | GCCCCCACUAUCAGGGGCC | 2895 | 2541 | GGCCCCUGAUAGUGGGGGC | 3122 |
| 2541 | CCUGGCCUCAAUCACUGAG | 2896 | 2541 | CCUGGCCUCAAUCACUGAG | 2896 | 2559 | CUCAGUGAUUGAGGCCAGG | 3123 |
| 2559 | GACCAUCCAAGUCCAUCGC | 2897 | 2559 | GACCAUCCAAGUCCAUCGC | 2897 | 2577 | GCGAUGGACUUGGAUGGUC | 3124 |
| 2577 | CAGAUACUGGCGCAGCUUA | 2898 | 2577 | CAGAUACUGGCGCAGCUUA | 2898 | 2595 | UAAGCUGCGCCAGUAUCUG | 3125 |
| 2595 | ACGGGUCAUGAAGGUAGAA | 2899 | 2595 | ACGGGUCAUGAAGGUAGAA | 2899 | 2613 | UUCUACCUUCAUGACCCGU | 3126 |
| 2613 | AGACAGAGAAGGACCCUCC | 2900 | 2613 | AGACAGAGAAGGACCCUCC | 2900 | 2631 | GGAGGGUCCUUCUCUGUCU | 3127 |
| 2631 | CAGUUCUAAGUUGGUCACC | 2901 | 2631 | CAGUUCUAAGUUGGUCACC | 2901 | 2649 | GGUGACCAACUUAGAACUG | 3128 |
| 2649 | CAAGAAGGCACCCCAACCA | 2902 | 2649 | CAAGAAGGCACCCCAACCA | 2902 | 2667 | UGGUUGGGGUGCCUUCUUG | 3129 |
| 2667 | AGCCAAACCUAGGUUAGCU | 2903 | 2667 | AGCCAAACCUAGGUUAGCU | 2903 | 2685 | AGCUAACCUAGGUUUGGCU | 3130 |
| 2685 | UGAGCGGAUGACCACACGA | 2904 | 2685 | UGAGCGGAUGACCACACGA | 2904 | 2703 | UCGUGUGGUCAUCCGCUCA | 3131 |
| 2703 | AGAAAAGAAGGUUCUGGAA | 2905 | 2703 | AGAAAAGAAGGUUCUGGAA | 2905 | 2721 | UUCCAGAACCUUCUUUUCU | 3132 |
| 2721 | AGCAGGCAUGGGGAAAGUC | 2906 | 2721 | AGCAGGCAUGGGGAAAGUC | 2906 | 2739 | GACUUUCCCCAUGCCUGCU | 3133 |
| 2739 | CACCUCGGCAUCAUUUGGG | 2907 | 2739 | CACCUCGGCAUCAUUUGGG | 2907 | 2757 | CCCAAAUGAUGCCGAGGUG | 3134 |
| 2757 | GGAAGAGUCCACUCCAGGC | 2908 | 2757 | GGAAGAGUCCACUCCAGGC | 2908 | 2775 | GCCUGGAGUGGACUCUUCC | 3135 |
| 2775 | CCAGACUAACUGAGAGACA | 2909 | 2775 | CCAGACUAACUCAGAGACA | 2909 | 2793 | UGUCUCUGAGUUAGUCUGG | 3136 |
| 2793 | AGCUGUGGUGGCCCUCACU | 2910 | 2793 | AGCUGUGGUGGCCCUCACU | 2910 | 2811 | AGUGAGGGCCACCACAGCU | 3137 |
| 2811 | UCAGGACCAGCCCUCAGAG | 2911 | 2811 | UCAGGACCAGCCCUCAGAG | 2911 | 2829 | CUCUGAGGGCUGGUCCUGA | 3138 |
| 2829 | GGCAGCCACAGGGGGAGCC | 2912 | 2829 | GGCAGCCACAGGGGGAGCC | 2912 | 2847 | GGCUCCCCCUGUGGCUGCC | 3139 |
| 2847 | CACUCUGGCCCAGACCAUU | 2913 | 2847 | CACUCUGGCCCAGACCAUU | 2913 | 2865 | AAUGGUCUGGGGCAGAGUG | 3140 |
| 2865 | UUCUGAGGCAGCCAUUGGG | 2914 | 2865 | UUCUGAGGCAGCCAUUGGG | 2914 | 2883 | CCCAAUGGCUGCCUCAGAA | 3141 |
| 2883 | GGGAGCCAUGCUGGGCCAG | 2915 | 2883 | GGGAGCCAUGGUGGGCCAG | 2915 | 2901 | CUGGCCCAGCAUGGCUCCC | 3142 |
| 2901 | GACCACCUCAGAGGAGGCU | 2916 | 2901 | GACCACCUCAGAGGAGGCU | 2916 | 2919 | AGCCUCCUCUGAGGUGGUC | 3143 |
| 2919 | UGUCGGGGGAGCCACUCCG | 2917 | 2919 | UGUCGGGGGAGCCACUCCG | 2917 | 2937 | CGGAGUGGCUCCCCCGACA | 3144 |
| 2937 | GGACCAGACCACCUCAGAG | 2918 | 2937 | GGACCAGACCACCUCAGAG | 2918 | 2955 | CUCUGAGGUGGUCUGGUCC | 3145 |
| 2955 | GGAGACUGUGGGAGGAGCC | 2919 | 2955 | GGAGACUGUGGGAGGAGCC | 2919 | 2973 | GGCUCCUCCCACAGUCUCC | 3146 |
| 2973 | CAUUCUGGACCAGACCACC | 2920 | 2973 | CAUUCUGGACCAGACCACC | 2920 | 2991 | GGUGGUCUGGUCCAGAAUG | 3147 |
| 2991 | CUCAGAGGAUGCUGUUGGG | 2921 | 2991 | CUCAGAGGAUGCUGUUGGG | 2921 | 3009 | CCCAACAGCAUCCUCUGAG | 3148 |
| 3009 | GGGAGCCACGCUGGGCCAG | 2922 | 3009 | GGGAGCCACGCUGGGCCAG | 2922 | 3027 | CUGGCCCAGCGUGGCUCCC | 3149 |
| 3027 | GACUACCUCAGAGGAGGCU | 2923 | 3027 | GACUACCUCAGAGGAGGCU | 2923 | 3045 | AGCCUCCUCUGAGGUAGUC | 3150 |
| 3045 | UGUAGGAGGAGCUACACUG | 2924 | 3045 | UGUAGGAGGAGGUACACUG | 2924 | 3063 | CAGUGUAGCUCCUCCUACA | 3151 |
| 3063 | GGCCCAGACCACCUCGGAG | 2925 | 3063 | GGCCCAGACCACCUCGGAG | 2925 | 3081 | CUCCGAGGUGGUCUGGGCC | 3152 |
| 3081 | GGCAGCCAUGGAGGGAGCC | 2926 | 3081 | GGCAGCCAUGGAGGGAGCC | 2926 | 3099 | GGCUCCCUCCAUGGCUGCC | 3153 |
| 3099 | CACACUGGACCAGACUACG | 2927 | 3099 | CACACUGGACCAGACUACG | 2927 | 3117 | CGUAGUCUGGUCCAGUGUG | 3154 |
| 3117 | GUCAGAGGAGGCUCCAGGG | 2928 | 3117 | GUCAGAGGAGGCUCCAGGG | 2928 | 3135 | CCCUGGAGCCUCCUCUGAC | 3155 |
| 3135 | GGGCACCGAGCUGAUCCAA | 2929 | 3135 | GGGCACCGAGCUGAUCCAA | 2929 | 3153 | UUGGAUCAGCUCGGUGCCC | 3156 |
| 3153 | AACUCCUCUAGCCUCGAGC | 2930 | 3153 | AACUCCUCUAGCCUCGAGC | 2930 | 3171 | GCUCGAGGCUAGAGGAGUU | 3157 |
| 3171 | CACAGACCACCAGACCCCC | 2931 | 3171 | CACAGACCACCAGACCCCC | 2931 | 3189 | GGGGGUCUGGUGGUCUGUG | 3158 |
| 3189 | CCCAACCUCACCUGUGCAG | 2932 | 3189 | CCCAACCUCACCUGUGCAG | 2932 | 3207 | CUGCACAGGUGAGGUUGGG | 3159 |
| 3207 | GGGAACUACACCCCAGAUA | 2933 | 3207 | GGGAACUACACCCCAGAUA | 2933 | 3225 | UAUCUGGGGUGUAGUUCCC | 3160 |
| 3225 | AUCUCCCAGUACACUGAUU | 2934 | 3225 | AUCUCCCAGUACACUGAUU | 2934 | 3243 | AAUCAGUGUACUGGGAGAU | 3161 |
| 3243 | UGGGAGUCUCAGGACCUUG | 2935 | 3243 | UGGGAGUCUCAGGACCUUG | 2935 | 3261 | CAAGGUCCUGAGACUCCCA | 3162 |
| 3261 | GGAGCUAGGCAGCGAAUCU | 2936 | 3261 | GGAGCUAGGCAGCGAAUCU | 2936 | 3279 | AGAUUCGCUGCCUAGCUCC | 3163 |
| 3279 | UCAGGGGGCCUCAGAAUCU | 2937 | 3279 | UCAGGGGGCCUCAGAAUCU | 2937 | 3297 | AGAUUCUGAGGCCCCCUGA | 3164 |
| 3297 | UCAGGCCCCAGGAGAGGAG | 2938 | 3297 | UCAGGCCCCAGGAGAGGAG | 2938 | 3315 | CUCCUCUCCUGGGGCCUGA | 3165 |
| 3315 | GAACCUACUAGGAGAGGCA | 2939 | 3315 | GAACCUACUAGGAGAGGCA | 2939 | 3333 | UGCCUCUCCUAGUAGGUUC | 3166 |
| 3333 | AGGUGGAGGUCAGGACAUG | 2940 | 3333 | AGCUGGAGGUCAGGACAUG | 2940 | 3351 | CAUGUCCUGACCUCCAGCU | 3167 |
| 3351 | GGCUGAUUCGAUGCUGAUG | 2941 | 3351 | GGCUGAUUCGAUGCUGAUG | 2941 | 3369 | CAUCAGCAUCGAAUCAGCC | 3168 |
| 3369 | GCAGGGAUCUAGGGGCCUC | 2942 | 3369 | GCAGGGAUCUAGGGGCCUC | 2942 | 3387 | GAGGCCCCUAGAUCCCUGC | 3169 |
| 3387 | CACUGAUCAGGCCAUAUUU | 2943 | 3387 | CACUGAUCAGGCCAUAUUU | 2943 | 3405 | AAAUAUGGCCUGAUCAGUG | 3170 |
| 3405 | UUAUGCUGUGACACCACUG | 2944 | 3405 | UUAUGCUGUGACACCACUG | 2944 | 3423 | CAGUGGUGUCACAGCAUAA | 3171 |
| 3423 | GCCCUGGUGUCCCCAUUUG | 2945 | 3423 | GCCCUGGUGUCCCCAUUUG | 2945 | 3441 | CAAAUGGGGACACCAGGGC | 3172 |
| 3441 | GGUGGCAGUAUGCCCCAUA | 2946 | 3441 | GGUGGCAGUAUGCCCCAUA | 2946 | 3459 | UAUGGGGCAUACUGCCACC | 3173 |
| 3459 | ACCUGCAGCAGGCCUAGAC | 2947 | 3459 | ACCUGCAGCAGGCCUAGAC | 2947 | 3477 | GUCUAGGCCUGCUGCAGGU | 3174 |
| 3477 | CGUGACCCAACCUUGUGGG | 2948 | 3477 | CGUGACCCAACCUUGUGGG | 2948 | 3495 | CCCACAAGGUUGGGUCACG | 3175 |
| 3495 | GGACUGUGGAACAAUCCAA | 2949 | 3495 | GGACUGUGGAACAAUCCAA | 2949 | 3513 | UUGGAUUGUUCCACAGUCC | 3176 |
| 3513 | AGAGAAUUGGGUGUGUCUC | 2950 | 3513 | AGAGAAUUGGGUGUGUCUC | 2950 | 3531 | GAGACACACCCAAUUCUCU | 3177 |
| 3531 | CUCUUGCUAUCAGGUCUAC | 2951 | 3531 | CUCUUGCUAUCAGGUCUAC | 2951 | 3549 | GUAGACCUGAUAGCAAGAG | 3178 |
| 3549 | CUGUGGUCGUUACAUCAAU | 2952 | 3549 | CUGUGGUCGUUACAUCAAU | 2952 | 3567 | AUUGAUGUAACGACCACAG | 3179 |
| 3567 | UGGCCACAUGCUCCAACAC | 2953 | 3567 | UGGCCACAUGCUCCAACAC | 2953 | 3585 | GUGUUGGAGCAUGUGGCCA | 3180 |
| 3585 | CCAUGGAAAUUCUGGACAC | 2954 | 3585 | CCAUGGAAAUUCUGGACAC | 2954 | 3603 | GUGUCCAGAAUUUCCAUGG | 3181 |
| 3603 | CCCGCUGGUCCUCAGCUAC | 2955 | 3603 | CCCGCUGGUCCUCAGCUAC | 2955 | 3621 | GUAGCUGAGGACCAGCGGG | 3182 |
| 3621 | CAUCGACCUGUCAGCCUGG | 2956 | 3621 | CAUCGACCUGUCAGCCUGG | 2956 | 3639 | CCAGGCUGACAGGUCGAUG | 3183 |
| 3639 | GUGUUACUACUGUCAGGCC | 2957 | 3639 | GUGUUACUACUGUCAGGCC | 2957 | 3657 | GGCCUGACAGUAGUAACAC | 3184 |
| 3657 | CUAUGUCCACCACCAGGCU | 2958 | 3657 | CUAUGUCCACCACCAGGCU | 2958 | 3675 | AGCCUGGUGGUGGACAUAG | 3185 |
| 3675 | UCUCCUAGAUGUGAAGAAC | 2959 | 3675 | UCUCCUAGAUGUGAAGAAC | 2959 | 3693 | GUUCUUCACAUCUAGGAGA | 3186 |
| 3693 | CAUCGCCCACCAGAACAAG | 2960 | 3693 | CAUCGCCCACCAGAACAAG | 2960 | 3711 | CUUGUUCUGGUGGGCGAUG | 3187 |
| 3711 | GUUUGGGGAGGAUAUGCCC | 2961 | 3711 | GUUUGGGGAGGAUAUGCCC | 2961 | 3729 | GGGCAUAUCCUCCCCAAAC | 3188 |
| 3729 | GCACCCACACUAAGCCCCA | 2962 | 3729 | CCACCCACACUAAGCCCCA | 2962 | 3747 | UGGGGCUUAGUGUGGGUGG | 3189 |
| 3747 | AGAAUACGGUCCCUCUUCA | 2963 | 3747 | AGAAUACGGUCCCUCUUCA | 2963 | 3765 | UGAAGAGGGACCGUAUUCU | 3190 |
| 3765 | ACCUUCUGAGGCCCACGAU | 2964 | 3765 | ACCUUCUGAGGCCCACGAU | 2964 | 3783 | AUCGUGGGCCUCAGAAGGU | 3191 |
| 3783 | UAGACCAGCUGUAGCUCAU | 2965 | 3783 | UAGACCAGCUGUAGCUCAU | 2965 | 3801 | AUGAGCUACAGCUGGUCUA | 3192 |
| 3801 | UUCCAGCCUGUACCUUGGA | 2966 | 3801 | UUCCAGCCUGUACCUUGGA | 2966 | 3819 | UCCAAGGUACAGGCUGGAA | 3193 |
| 3819 | AUGAGGGGUAGCCUCCCAC | 2967 | 3819 | AUGAGGGGUAGCCUCCCAC | 2967 | 3837 | GUGGGAGGCUACCCCUCAU | 3194 |
| 3837 | CUGCAUCCCAUCCUGAAUA | 2968 | 3837 | CUGCAUCCCAUCCUGAAUA | 2968 | 3855 | UAUUCAGGAUGGGAUGCAG | 3195 |
| 3855 | AUCCUUUGCAACUCCCCAA | 2969 | 3855 | AUCCUUUGCAACUCCCCAA | 2969 | 3873 | UUGGGGAGUUGCAAAGGAU | 3196 |
| 3873 | AGAGUGCUUAUUUAAGUGU | 2970 | 3873 | AGAGUGCUUAUUUAAGUGU | 2970 | 3891 | ACACUUAAAUAAGCACUCU | 3197 |
| 3891 | UUAAUACUUUUAAGAGAAC | 2971 | 3891 | UUAAUACUUUUAAGAGAAC | 2971 | 3909 | GUUCUCUUAAAAGUAUUAA | 3198 |
| 3909 | CUGCGACGAUUAAUUGUGG | 2972 | 3909 | CUGCGACGAUUAAUUGUGG | 2972 | 3927 | CCACAAUUAAUCGUCGCAG | 3199 |
| 3927 | GAUCUCCCCCUGCCCAUUG | 2973 | 3927 | GAUCUCCCCCUGCCCAUUG | 2973 | 3945 | CAAUGGGCAGGGGGAGAUC | 3200 |
| 3945 | GCCUGCUUGAGGGGCACCA | 2974 | 3945 | GCCUGCUUGAGGGGCACCA | 2974 | 3963 | UGGUGCCCCUCAAGCAGGC | 3201 |
| 3963 | ACUACUCCAGCCCAGAAGG | 2975 | 3963 | ACUACUCCAGCCCAGAAGG | 2975 | 3981 | GCUUCUGGGCUGGAGUAGU | 3202 |
| 3981 | GAAAGGGGGGCAGCUCAGU | 2976 | 3981 | GAAAGGGGGGCAGCUCAGU | 2976 | 3999 | ACUGAGCUGCCCCCCUUUC | 3203 |
| 3999 | UGGCCCCAAGAGGGAGCUG | 2977 | 3999 | UGGCCCCAAGAGGGAGCUG | 2977 | 4017 | CAGCUCCCUCUUGGGGCCA | 3204 |
| 4017 | GAUAUCAUGAGGAUAACAU | 2978 | 4017 | GAUAUCAUGAGGAUAACAU | 2978 | 4035 | AUGUUAUCCUCAUGAUAUC | 3205 |
| 4035 | UUGGCGGGAGGGGAGUUAA | 2979 | 4035 | UUGGCGGGAGGGGAGUUAA | 2979 | 4053 | UUAACUCCCCUCCCGCCAA | 3206 |
| 4053 | ACUGGCAGGCAUGGCAAGG | 2980 | 4053 | ACUGGCAGGCAUGGCAAGG | 2980 | 4071 | CCUUGCCAUGCCUGCCAGU | 3207 |
| 4071 | GUUGCAUAUGUAAUAAAGU | 2981 | 4071 | GUUGCAUAUGUAAUAAAGU | 2981 | 4089 | ACUUUAUUACAUAUGCAAC | 3208 |

HDAC7: AF239243.1

| | | | | | | | | |
|---|---|---|---|---|---|---|---|---|
| 3 | AAUACCUACCUUGCAGGAC | 3321 | 3 | AAUACCUACCUUGCAGGAC | 3321 | 21 | GUCCUGCAAGGUAGGUAUU | 3494 |
| 21 | CCACGACAGGAUUAAGUGA | 3322 | 21 | CCACGACAGGAUUAAGUGA | 3322 | 39 | UCACUUAAUCCUGUCGUGG | 3495 |
| 39 | AGGAAAAACCCCCAUGAGA | 3323 | 39 | AGGAAAAACCCCCAUGAGA | 3323 | 57 | UCUCAUGGGGGUUUUUCCU | 3496 |
| 57 | AGUGUUUUGCCAUUGUCAA | 3324 | 57 | AGUGUUUUGCCAUUGUCAA | 3324 | 75 | UUGACAAUGGCAAAACACU | 3497 |
| 75 | AGUGAGCCUGAGGGAGGCU | 3325 | 75 | AGUGAGCCUGAGGGAGGCU | 3325 | 93 | AGCCUCCCUCAGGCUCACU | 3498 |
| 93 | UGAGGGGGGAUCAGGCUGU | 3326 | 93 | UGAGGGGGGAUCAGGCUGU | 3326 | 111 | ACAGCCUGAUCCCCCCUCA | 3499 |
| 111 | UAUCAUGCCCCCGAGGACA | 3327 | 111 | UAUCAUGCCCCCGAGGACA | 3327 | 129 | UGUCCUCGGGGGCAUGAUA | 3500 |
| 129 | AAACUUUCCAGUUUACCCU | 3328 | 129 | AAACUUUCCAGUUUACCCU | 3328 | 147 | AGGGUAAACUGGAAAGUUU | 3501 |
| 147 | UGCUCCCUCUCUCUGUCCC | 3329 | 147 | UGCUCCCUCUCUCUGUCCC | 3329 | 165 | GGGACAGAGAGAGGGAGCA | 3502 |
| 165 | CUAGGCUGCCCCAGGCCCU | 3330 | 165 | CUAGGCUGCCCCAGGCCCU | 3330 | 183 | AGGGCCUGGGGCAGCCUAG | 3503 |
| 183 | UGUGCAGACACACCAGGCC | 3331 | 183 | UGUGGAGACACACCAGGCC | 3331 | 201 | GGCCUGGUGUGUCUGCACA | 3504 |
| 201 | CCUCAGCCGCAGCCCAUGG | 3332 | 201 | CCUCAGCCGCAGCCCAUGG | 3332 | 219 | CCAUGGGCUGCGGCUGAGG | 3505 |
| 219 | GACCUGCGGGUGGGCCAGC | 3333 | 219 | GACCUGCGGGUGGGCCAGC | 3333 | 237 | GCUGGCCCACCCGCAGGUC | 3506 |
| 237 | CGGCCCCCAGUGGAGCCCC | 3334 | 237 | CGGCCCCCAGUGGAGCCCC | 3334 | 255 | GGGGCUCCACUGGGGGCCG | 3507 |
| 255 | CCACCAGAGCCCACAUUGC | 3335 | 255 | CCACCAGAGCCCACAUUGC | 3335 | 273 | GCAAUGUGGGCUCUGGUGG | 3508 |
| 273 | CUGGCCCUGCAGCGUCCCC | 3336 | 273 | CUGGCCCUGCAGCGUCCCC | 3336 | 291 | GGGGACGCUGCAGGGCCAG | 3509 |
| 291 | CAGCGCCUGCACCACCACC | 3337 | 291 | CAGCGCCUGCACCACCACC | 3337 | 309 | GGUGGUGGUGCAGGCGCUG | 3510 |
| 309 | CUCUUCCUAGCAGGCCUGC | 3338 | 309 | CUCUUCCUAGCAGGCCUGC | 3338 | 327 | GCAGGCCUGCUAGGAAGAG | 3511 |
| 327 | CAGCAGCAGCGCUCGGUGG | 3339 | 327 | CAGCAGCAGCGCUCGGUGG | 3339 | 345 | CCACCGAGCGCUGCUGCUG | 3512 |
| 345 | GAGCGCAUGAGGCUCUCCA | 3340 | 345 | GAGCCCAUGAGGCUCUCCA | 3340 | 363 | UGGAGAGCCUCAUGGGCUC | 3513 |
| 363 | AUGGACACGCCGAUGCCCG | 3341 | 363 | AUGGACACGCCGAUGCCCG | 3341 | 381 | CGGGCAUGGGCGUGUCCAU | 3514 |
| 381 | GAGUUGCAGGUGGGACCCC | 3342 | 381 | GAGUUGCAGGUGGGACCCC | 3342 | 399 | GGGGUCCCACCUGCAACUC | 3515 |
| 399 | CAGGAACAAGAGCUGCGGC | 3343 | 399 | CAGGAACAAGAGCUGCGGC | 3343 | 417 | GCCGCAGCUCUUGUUCCUG | 3516 |
| 417 | CAGCUUCUCCACAAGGACA | 3344 | 417 | CAGCUUCUCCACAAGGACA | 3344 | 435 | UGUCCUUGUGGAGAAGCUG | 3517 |
| 435 | AAGAGCAAGCGAAGUGCUG | 3345 | 435 | AAGAGCAAGCGAAGUGCUG | 3345 | 453 | CAGCACUUCGCUUGCUCUU | 3518 |
| 453 | GUAGCCAGCAGCGUGGUCA | 3346 | 453 | GUAGGCAGGAGCGUGGUCA | 3346 | 471 | UGACCACGCUGCUGGCUAC | 3519 |
| 471 | AAGCAGAAGCUAGCGGAGG | 3347 | 471 | AAGCAGAAGCUAGCGGAGG | 3347 | 489 | CCUCCGCUAGCUUCUGCUU | 3520 |
| 489 | GUGAUUCUGAAAAAACAGC | 3348 | 489 | GUGAUUCUGAAAAAACAGC | 3348 | 507 | GCUGUUUUUUCAGAAUCAC | 3521 |
| 507 | CAGGCGGCCCUAGAAAGAA | 3349 | 507 | CAGGCGGCCCUAGAAAGAA | 3349 | 525 | UUCUUUCUAGGGCCGCCUG | 3522 |
| 525 | ACAGUCCAUCCCAACAGCC | 3350 | 525 | ACAGUCCAUCCCAACAGCC | 3350 | 543 | GGCUGUUGGGAUGGACUGU | 3523 |
| 543 | CCCGGCAUUCCCUACAGAA | 3351 | 543 | CCCGGCAUUCCCUACAGAA | 3351 | 561 | UUCUGUAGGGAAUGCCGGG | 3524 |
| 561 | ACCCUGGAGCCCCUGGAGA | 3352 | 561 | ACCCUGGAGCCCCUGGAGA | 3352 | 579 | UCUCCAGGGGCUCCAGGGU | 3525 |
| 579 | ACGGAAGGAGCCACCCGCU | 3353 | 579 | ACGGAAGGAGCCACCCGCU | 3353 | 597 | AGCGGGUGGCUCCUUCCGU | 3526 |
| 597 | UCCAUGCUCAGCAGCUUUU | 3354 | 597 | UCCAUGCUCAGCAGCUUUU | 3354 | 615 | AAAAGCUGCUGAGCAUGGA | 3527 |
| 615 | UUGCCUCCUGUUCCCAGCC | 3355 | 615 | UUGCCUCCUGUUCCCAGCC | 3355 | 633 | GGCUGGGAACAGGAGGCAA | 3528 |
| 633 | CUGCCCAGUGACCCCCCAG | 3356 | 633 | CUGCCCAGUGACCCCCCAG | 3356 | 651 | CUGGGGGGUCACUGGGCAG | 3529 |
| 651 | GAGCACUUCCCUCUGCGCA | 3357 | 651 | GAGCACUUCCCUCUGCGCA | 3357 | 669 | UGCGCAGAGGGAAGUGCUC | 3530 |
| 669 | AAGACAGUCUCUGAGCCCA | 3358 | 669 | AAGACAGUCUCUGAGCCCA | 3358 | 687 | UGGGCUCAGAGACUGUCUU | 3531 |
| 687 | AACCUGAAGCUGCGCUAUA | 3359 | 687 | AACCUGAAGCUGCGCUAUA | 3359 | 705 | UAUAGCGCAGCUUCAGGUU | 3532 |
| 705 | AAGCCCAAGAAGUCCCUGG | 3360 | 705 | AAGCCCAAGAAGUCCCUGG | 3360 | 723 | CCAGGGACUUCUUGGGCUU | 3533 |
| 723 | GAGCGGAGGAAGAAUCCAC | 3361 | 723 | GAGCGGAGGAAGAAUCCAC | 3361 | 741 | GUGGAUUCUUCCUCCGCUC | 3534 |
| 741 | CUGCUCCGAAAGGAGAGUG | 3362 | 741 | CUGCUCCGAAAGGAGAGUG | 3362 | 759 | CACUCUCCUUUCGGAGCAG | 3535 |
| 759 | GCGCCCCCCAGCCUCCGGC | 3363 | 759 | GCGCCCCCCAGCCUCCGGC | 3363 | 777 | GCCGGAGGCUGGGGGGCGC | 3536 |
| 777 | CGGCGGCCCGCAGAGACCC | 3364 | 777 | CGGCGGCCCGCAGAGACCC | 3364 | 795 | GGGUCUCUGCGGGCCGCCG | 3537 |
| 795 | CUCGGAGACUCCUCCCCAA | 3365 | 795 | CUCGGAGACUCCUCCCCAA | 3365 | 813 | UUGGGGAGGAGUCUCCGAG | 3538 |
| 813 | AGUAGUAGCAGCACGCCCG | 3366 | 813 | AGUAGUAGCAGCACGCCCG | 3366 | 831 | CGGGCGUGCUGCUACUACU | 3539 |
| 831 | GCAUCAGGGUGCAGCUCCC | 3367 | 831 | GCAUCAGGGUGCAGCUCCC | 3367 | 849 | GGGAGCUGCACCCUGAUGC | 3540 |
| 849 | CCCAAUGACAGCGAGCACG | 3368 | 849 | CCCAAUGACAGCGAGCACG | 3368 | 867 | CGUGCUCGCUGUCAUUGGG | 3541 |
| 867 | GGCCCCAAUCCCAUCCUGG | 3369 | 867 | GGCCCCAAUCCCAUCCUGG | 3369 | 885 | CCAGGAUGGGAUUGGGGCC | 3542 |
| 885 | GGCGACAGUGACCGCAGGA | 3370 | 885 | GGCGACAGUGACCGCAGGA | 3370 | 903 | UCCUGCGGUCACUGUCGCC | 3543 |
| 903 | ACCCAUCCGACUCUGGGCC | 3371 | 903 | ACCCAUCCGACUCUGGGCC | 3371 | 921 | GGCCCAGAGUCGGAUGGGU | 3544 |
| 921 | CCUCGGGGGCCAAUCCUGG | 3372 | 921 | CCUCGGGGGCCAAUCCUGG | 3372 | 939 | CCAGGAUUGGCCCCCGAGG | 3545 |
| 939 | GGGAGCCCCCACACUCCCC | 3373 | 939 | GGGAGCCCCCACACUCCCC | 3373 | 957 | GGGGAGUGUGGGGGCUCCC | 3546 |
| 957 | CUCUUCCUGCCCCAUGGCU | 3374 | 957 | CUCUUCCUGCCCCAUGGCU | 3374 | 975 | AGCCAUGGGGCAGGAAGAG | 3547 |
| 975 | UUGGAGCCCGAGGCUGGGG | 3375 | 975 | UUGGAGCCCGAGGCUGGGG | 3375 | 993 | CCCCAGCCUCGGGCUCCAA | 3548 |
| 993 | GGCACCUUGCCCUCUCGCC | 3376 | 993 | GGCACCUUGCCCUCUCGCC | 3376 | 1011 | GGCGAGAGGGCAAGGUGCC | 3549 |
| 1011 | CUGCAGCCCAUUCUCCUCC | 3377 | 1011 | CUGCAGCCCAUUCUCCUCC | 3377 | 1029 | GGAGGAGAAUGGGCUGCAG | 3550 |
| 1029 | CUGGACCCCUCAGGCUCUC | 3378 | 1029 | CUGGACCCCUCAGGCUCUC | 3378 | 1047 | GAGAGCCUGAGGGGUCCAG | 3551 |
| 1047 | CAUGCCCCGCUGCUGACUG | 3379 | 1047 | CAUGCCCCGCUGGUGACUG | 3379 | 1065 | CAGUCAGCAGCGGGGCAUG | 3552 |
| 1065 | GUGCCCGGGCUUGGGCCCU | 3380 | 1065 | GUGCCCGGGCUUGGGCCCU | 3380 | 1083 | AGGGCCCAAGCCCGGGCAC | 3553 |
| 1083 | UUGCCCUUCCACUUUGCCC | 3381 | 1083 | UUGCCCUUCCACUUUGCCC | 3381 | 1101 | GGGCAAAGUGGAAGGGCAA | 3554 |
| 1101 | CAGUCCUUAAUGACCACCG | 3382 | 1101 | CAGUCCUUAAUGACCACCG | 3382 | 1119 | CGGUGGUCAUUAAGGACUG | 3555 |
| 1119 | GAGCGGCUCUCUGGGUCAG | 3383 | 1119 | GAGCGGCUCUCUGGGUCAG | 3383 | 1137 | CUGACCCAGAGAGCCGCUC | 3556 |
| 1137 | GGCCUCCACUGGCCACUGA | 3384 | 1137 | GGCCUCCACUGGCCACUGA | 3384 | 1155 | UCAGUGGCCAGUGGAGGCC | 3557 |
| 1155 | AGCCGGACUGGCUCAGAGC | 3385 | 1155 | AGCCGGACUCGCUCAGAGC | 3385 | 1173 | GCUCUGAGCGAGUCCGGCU | 3558 |
| 1173 | CCCCUGCCCCCCAGUGCCA | 3386 | 1173 | CCCCUGCCCCCCAGUGCCA | 3386 | 1191 | UGGCACUGGGGGGGAGGGG | 3559 |
| 1191 | ACCGCUCCCCCAGCGCCGG | 3387 | 1191 | ACCGCUCCCCCACCGCCGG | 3387 | 1209 | CCGGCGGUGGGGGAGCGGU | 3560 |
| 1209 | GGCCCCAUGCAGCCCCGCC | 3388 | 1209 | GGCCCCAUGCAGCCCCGCC | 3388 | 1227 | GGCGGGGCUGCAUGGGGCC | 3561 |
| 1227 | CUGGAGCAGCUCAAAACUC | 3389 | 1227 | CUGGAGCAGCUCAAAACUC | 3389 | 1245 | GAGUUUUGAGCUGCUCCAG | 3562 |
| 1245 | CACGUCCAGGUGAUCAAGA | 3390 | 1245 | CACGUCCAGGUGAUCAAGA | 3390 | 1263 | UCUUGAUCACCUGGACGUG | 3563 |
| 1263 | AGGUCAGCCAAGCCGAGUG | 3391 | 1263 | AGGUCAGCCAAGCCGAGUG | 3391 | 1281 | CACUCGGCUUGGCUGACCU | 3564 |
| 1281 | GAGAAGCCCCGGCUGCGGC | 3392 | 1281 | GAGAAGCCCCGGCUGCGGC | 3392 | 1299 | GCCGCAGCCGGGGCUUCUC | 3565 |
| 1299 | CAGAUACCCUCGGCUGAAG | 3393 | 1299 | CAGAUACCCUCGGCUGAAG | 3393 | 1317 | CUUCAGCCGAGGGUAUCUG | 3566 |
| 1317 | GACCUGGAGACAGAUGGCG | 3394 | 1317 | GACCUGGAGACAGAUGGCG | 3394 | 1335 | CGCCAUCUGUCUCCAGGUC | 3567 |
| 1335 | GGGGGACCGGGCCAGGUGG | 3395 | 1335 | GGGGGACCGGGCCAGGUGG | 3395 | 1353 | CCACCUGGCCCGGUCCCCC | 3568 |
| 1353 | GUGGACGAUGGCCUGGAGC | 3396 | 1353 | GUGGACGAUGGCCUGGAGC | 3396 | 1371 | GCUCCAGGCCAUCGUCCAC | 3569 |
| 1371 | CACAGGGAGCUGGGCCAUG | 3397 | 1371 | CACAGGGAGCUGGGCCAUG | 3397 | 1389 | CAUGGCCCAGCUCCCUGUG | 3570 |
| 1389 | GGGCAGCCUGAGGCCAGAG | 3398 | 1389 | GGGCAGCCUGAGGCCAGAG | 3398 | 1407 | CUCUGGCCUCAGGCUGCCC | 3571 |
| 1407 | GGCCCCGCUCCUCUCCAGC | 3399 | 1407 | GGCCCCGCUCCUCUCCAGC | 3399 | 1425 | GCUGGAGAGGAGCGGGGCC | 3572 |
| 1425 | GAGCACCCUCAGGUGUUGC | 3400 | 1425 | CAGCACCCUCAGGUGUUGC | 3400 | 1443 | GCAACACCUGAGGGUGCUG | 3573 |
| 1443 | CUCUGGGAACAGCAGCGAC | 3401 | 1443 | CUCUGGGAACAGCAGCGAC | 3401 | 1461 | GUCGCUGCUGUUCCCAGAG | 3574 |
| 1461 | CUGGCUGGGCGGCUCCCCC | 3402 | 1461 | CUGGCUGGGCGGCUCCCCC | 3402 | 1479 | GGGGGAGCCGCCCAGCCAG | 3575 |
| 1479 | CGGGGCAGCACCGGGGACA | 3403 | 1479 | CGGGGCAGCACCGGGGACA | 3403 | 1497 | UGUCCCCGGUGCUGCCCCG | 3576 |
| 1497 | ACUGUGCUGCUUCCUCUGG | 3404 | 1497 | ACUGUGCUGCUUCCUCUGG | 3404 | 1515 | CCAGAGGAAGCAGCACAGU | 3577 |
| 1515 | GCCCAGGGUGGGCACCGGC | 3405 | 1515 | GCCCAGGGUGGGCACCGGC | 3405 | 1533 | GCCGGUGCCCACCCUGGGC | 3578 |
| 1533 | CCUCUGUCCCGGGCUCAGU | 3406 | 1533 | CCUCUGUCCCGGGCUCAGU | 3406 | 1551 | ACUGAGCCCGGGACAGAGG | 3579 |
| 1551 | UCUUCCCCAGCCGCACCUG | 3407 | 1551 | UCUUCCCCAGCCGCACCUG | 3407 | 1569 | CAGGUGCGGCUGGGGAAGA | 3580 |
| 1569 | GCCUCACUGUCAGCCCCAG | 3408 | 1569 | GCCUCACUGUCAGCCCCAG | 3408 | 1587 | CUGGGGCUGACAGUGAGGC | 3581 |
| 1587 | GAGCCUGCCAGCCAGGCCC | 3409 | 1587 | GAGCCUGCCAGCCAGGCCC | 3409 | 1605 | GGGCCUGGCUGGCAGGCUC | 3582 |
| 1605 | CGAGUCCUCUCCAGCUCAG | 3410 | 1605 | GGAGUCCUCUCCAGCUCAG | 3410 | 1623 | CUGAGCUGGAGAGGACUCG | 3583 |
| 1623 | GAGACCCCUGCCAGGACCC | 3411 | 1623 | GAGACCCCUGCCAGGACCC | 3411 | 1641 | GGGUCCUGGCAGGGGUCUC | 3584 |
| 1641 | CUGCCCUUCACCACAGGGC | 3412 | 1641 | CUGCCCUUCACCACAGGGC | 3412 | 1659 | GCCCUGUGGUGAAGGGCAG | 3585 |
| 1659 | CUGAUCUAUGACUCGGUCA | 3413 | 1659 | CUGAUCUAUGACUCGGUCA | 3413 | 1677 | UGACCGAGUCAUAGAUCAG | 3586 |
| 1677 | AUGCUGAAGCACCAGUGCU | 3414 | 1677 | AUGCUGAAGCACCAGUGCU | 3414 | 1695 | AGCACUGGUGCUUCAGCAU | 3587 |
| 1695 | UCCUGCGGUGACAACAGCA | 3415 | 1695 | UCCUGCGGUGACAACAGCA | 3415 | 1713 | UGCUGUUGUCACCGCAGGA | 3588 |
| 1713 | AGGCACCCGGAGCACGCCG | 3416 | 1713 | AGGCACCCGGAGCACGCCG | 3416 | 1731 | CGGCGUGCUCCGGGUGCCU | 3589 |
| 1731 | GGCCGCAUCCAGAGCAUCU | 3417 | 1731 | GGCCGCAUCCAGAGCAUCU | 3417 | 1749 | AGAUGCUCUGGAUGCGGCC | 3590 |
| 1749 | UGGUCCCGGCUGCAGGAGC | 3418 | 1749 | UGGUCCCGGCUGCAGGAGC | 3418 | 1767 | GCUCCUGCAGCCGGGACCA | 3591 |
| 1767 | CGGGGGCUCCGGAGCCAGU | 3419 | 1767 | CGGGGGCUCCGGAGCCAGU | 3419 | 1785 | ACUGGCUCCGGAGCCCCCG | 3592 |
| 1785 | UGUGAGUGUCUCCGAGGCC | 3420 | 1785 | UGUGAGUGUCUCCGAGGCC | 3420 | 1803 | GGCCUCGGAGACACUCACA | 3593 |
| 1803 | CGGAAGGCCUCCCUGGAAG | 3421 | 1803 | CGGAAGGCCUCCCUGGAAG | 3421 | 1821 | CUUCCAGGGAGGCCUUCCG | 3594 |
| 1821 | GAGCUGCAGUCGGUCCACU | 3422 | 1821 | GAGCUGCAGUCGGUCCACU | 3422 | 1839 | AGUGGACCGACUGCAGCUC | 3595 |
| 1839 | UCUGAGCGGCACGUGCUCC | 3423 | 1839 | UCUGAGCGGCACGUGCUCC | 3423 | 1857 | GGAGCACGUGCCGCUCAGA | 3596 |
| 1857 | CUCUACGGCACCAACCCGC | 3424 | 1857 | CUCUACGGCACCAACCCGC | 3424 | 1875 | GCGGGUUGGUGCCGUAGAG | 3597 |
| 1875 | CUCAGCCGCCUCAAACUGG | 3425 | 1875 | CUCAGCCGCCUCAAACUGG | 3425 | 1893 | CCAGUUUGAGGCGGCUGAG | 3598 |
| 1893 | GACAACGGGAAGCUGGCAG | 3426 | 1893 | GACAACGGGAAGCUGGCAG | 3426 | 1911 | CUGCCAGCUUCCCGUUGUC | 3599 |
| 1911 | GGGCUCCUGGCACAGCGGA | 3427 | 1911 | GGGCUCCUGGCACAGCGGA | 3427 | 1929 | UCCGCUGUGCCAGGAGCCC | 3600 |
| 1929 | AUGUUUGAGAUGCUGCCCU | 3428 | 1929 | AUGUUUGAGAUGCUGCCCU | 3428 | 1947 | AGGGCAGCAUCUCAAACAU | 3601 |
| 1947 | UGUGGUGGGGUUGGGGUGG | 3429 | 1947 | UGUGGUGGGGUUGGGGUGG | 3429 | 1965 | CCACCCCAACCCCACCACA | 3602 |
| 1965 | GACACUGACACCAUCUGGA | 3430 | 1965 | GACACUGACACCAUCUGGA | 3430 | 1983 | UCCAGAUGGUGUCAGUGUC | 3603 |
| 1983 | AAUGAGCUUCAUUCCUCCA | 3431 | 1983 | AAUGAGCUUCAUUCCUCCA | 3431 | 2001 | UGGAGGAAUGAAGCUCAUU | 3604 |
| 2001 | AAUGCAGCCCGCUGGGCCG | 3432 | 2001 | AAUGCAGCCCGCUGGGCCG | 3432 | 2019 | CGGCCCAGCGGGCUGCAUU | 3605 |
| 2019 | GCUGGCAGUGUCACUGACC | 3433 | 2019 | GCUGGCAGUGUCACUGACC | 3433 | 2037 | GGUCAGUGACACUGCCAGC | 3606 |
| 2037 | CUCGCCUUCAAAGUGGCUU | 3434 | 2037 | CUCGCCUUCAAAGUGGCUU | 3434 | 2055 | AAGCCACUUUGAAGGCGAG | 3607 |
| 2055 | UCUCGUGAGCUAAAGAAUG | 3435 | 2055 | UCUCGUGAGCUAAAGAAUG | 3435 | 2073 | CAUUCUUUAGCUCACGAGA | 3608 |
| 2073 | GGUUUCGCUGUGGUGCGGC | 3436 | 2073 | GGUUUCGCUGUGGUGCGGC | 3436 | 2091 | GCCGCACCACAGCGAAACC | 3609 |
| 2091 | CCCCCAGGACACCAUGCAG | 3437 | 2091 | CCCCCAGGACACCAUGCAG | 3437 | 2109 | CUGCAUGGUGUCCUGGGGG | 3610 |
| 2109 | GAUCAUUCAACAGCCAUGG | 3438 | 2109 | GAUCAUUCAACAGCCAUGG | 3438 | 2127 | CCAUGGCUGUUGAAUGAUC | 3611 |
| 2127 | GGCUUCUGCUUCUUCAACU | 3439 | 2127 | GGCUUCUGCUUCUUCAACU | 3439 | 2145 | AGUUGAAGAAGCAGAAGCC | 3612 |
| 2145 | UCAGUGGCCAUCGCCUGCC | 3440 | 2145 | UCAGUGGCCAUCGCCUGCC | 3440 | 2163 | GGCAGGCGAUGGCCACUGA | 3613 |
| 2163 | CGGCAGCUGCAACAGCAGA | 3441 | 2163 | CGGCAGCUGCAACAGCAGA | 3441 | 2181 | UCUGCUGUUGCAGCUGCCG | 3614 |
| 2181 | AGCAAGGCCAGCAAGGCCA | 3442 | 2181 | AGCAAGGCCAGCAAGGCCA | 3442 | 2199 | UGGCCUUGCUGGCCUUGCU | 3615 |
| 2199 | AGCAAGAUCCUCAUUGUAG | 3443 | 2199 | AGCAAGAUCCUCAUUGUAG | 3443 | 2217 | CUACAAUGAGGAUCUUGCU | 3616 |
| 2217 | GACUGGGACGUGCACCAUG | 3444 | 2217 | GACUGGGACGUGCACCAUG | 3444 | 2235 | CAUGGUGCACGUCCCAGUC | 3617 |
| 2235 | GGCAACGGCACCCAGCAAA | 3445 | 2235 | GGCAACGGCACCCAGCAAA | 3445 | 2253 | UUUGCUGGGUGCCGUUGCC | 3618 |
| 2253 | ACCUUCUACCAAGACCCCA | 3446 | 2253 | ACCUUCUACCAAGACCCCA | 3446 | 2271 | UGGGGUCUUGGUAGAAGGU | 3619 |
| 2271 | AGUGUGCUCUACAUCUCCC | 3447 | 2271 | AGUGUGCUCUACAUCUCCC | 3447 | 2289 | GGGAGAUGUAGAGCACACU | 3620 |
| 2289 | CUGCAUCGCCAUGACGACG | 3448 | 2289 | CUGCAUCGCCAUGACGACG | 3448 | 2307 | CGUCGUCAUGGCGAUGCAG | 3621 |
| 2307 | GGCAACUUCUUCCCGGGGA | 3449 | 2307 | GGCAACUUCUUCCCGGGGA | 3449 | 2325 | UCCCCGGGAAGAAGUUGCC | 3622 |
| 2325 | AGUGGGGCUGUGGAUGAGG | 3450 | 2325 | AGUGGGGCUGUGGAUGAGG | 3450 | 2343 | CCUCAUCCACAGCCCCACU | 3623 |
| 2343 | GUAGGGGCUGGCAGCGGUG | 3451 | 2343 | GUAGGGGCUGGCAGCGGUG | 3451 | 2361 | CACCGCUGCCAGCCCCUAC | 3624 |
| 2361 | GAGGGCUUCAAUGUCAAUG | 3452 | 2361 | GAGGGCUUCAAUGUCAAUG | 3452 | 2379 | CAUUGACAUUGAAGCCCUC | 3625 |
| 2379 | GUGGCCUGGGCUGGAGGUC | 3453 | 2379 | GUGGCCUGGGCUGGAGGUC | 3453 | 2397 | GACCUCCAGCCCAGGCCAC | 3626 |
| 2397 | CUGGACCCCCCCAUGGGGG | 3454 | 2397 | CUGGACCCCCCCAUGGGGG | 3454 | 2415 | CCCCCAUGGGGGGGUCCAG | 3627 |
| 2415 | GAUCCUGAGUACCUGGCUG | 3455 | 2415 | GAUCCUGAGUACCUGGCUG | 3455 | 2433 | CAGCCAGGUACUCAGGAUC | 3628 |
| 2433 | GCUUUCAGGAUAGUCGUGA | 3456 | 2433 | GCUUUCAGGAUAGUCGUGA | 3456 | 2451 | UCACGACUAUCCUGAAAGC | 3629 |
| 2451 | AUGCCCAUCGCCCGAGAGU | 3457 | 2451 | AUGCCCAUCGCCCGAGAGU | 3457 | 2469 | ACUCUCGGGCGAUGGGCAU | 3630 |
| 2469 | UUCUCUCCAGACCUAGUCC | 3458 | 2469 | UUCUCUCCAGACCUAGUCC | 3458 | 2487 | GGACUAGGUCUGGAGAGAA | 3631 |
| 2487 | CUGGUGUCUGCUGGAUUUG | 3459 | 2487 | CUGGUGUCUGCUGGAUUUG | 3459 | 2505 | CAAAUCCAGCAGACACCAG | 3632 |
| 2505 | GAUGCUGCUGAGGGUCACC | 3460 | 2505 | GAUGCUGCUGAGGGUCACC | 3460 | 2523 | GGUGACCCUCAGCAGCAUC | 3633 |
| 2523 | CCGGCCCCACUGGGUGGCU | 3461 | 2523 | CCGGCCCCACUGGGUGGCU | 3461 | 2541 | AGCCACCCAGUGGGGCCGG | 3634 |
| 2541 | UACCAUGUUUCUGCCAAAU | 3462 | 2541 | UACCAUGUUUCUGCCAAAU | 3462 | 2559 | AUUUGGCAGAAACAUGGUA | 3635 |
| 2559 | UGUUUUGGAUACAUGACGC | 3463 | 2559 | UGUUUUGGAUACAUGACGC | 3463 | 2577 | GCGUCAUGUAUCCAAAACA | 3636 |
| 2577 | CAGCAACUGAUGAACCUGG | 3464 | 2577 | CAGCAACUGAUGAACCUGG | 3464 | 2595 | CCAGGUUCAUCAGUUGCUG | 3637 |
| 2595 | GCAGGAGGCGCAGUGGUGC | 3465 | 2595 | GCAGGAGGCGCAGUGGUGC | 3465 | 2613 | GCACCACUGCGCCUCCUGC | 3638 |
| 2613 | CUGGCCUUGGAGGGUGGCC | 3466 | 2613 | CUGGCCUUGGAGGGUGGCC | 3466 | 2631 | GGCCACCCUCCAAGGCCAG | 3639 |
| 2631 | CAUGACCUCACAGCCAUCU | 3467 | 2631 | CAUGACCUCACAGCCAUCU | 3467 | 2649 | AGAUGGCUGUGAGGUCAUG | 3640 |
| 2649 | UGUGACGCCUCUGAGGCCU | 3468 | 2649 | UGUGACGCCUCUGAGGCCU | 3468 | 2667 | AGGCCUCAGAGGCGUCACA | 3641 |
| 2667 | UGUGUGGCUGCUCUUCUGG | 3469 | 2667 | UGUGUGGCUGCUCUUCUGG | 3469 | 2685 | CCAGAAGAGCAGCCACACA | 3642 |
| 2685 | GGUAACAGGGUGGAUCCCC | 3470 | 2685 | GGUAACAGGGUGGAUCCCC | 3470 | 2703 | GGGGAUCCACCCUGUUACC | 3643 |
| 2703 | CUUUCAGAAGAAGGCUGGA | 3471 | 2703 | CUUUCAGAAGAAGGCUGGA | 3471 | 2721 | UCCAGCCUUCUUCUGAAAG | 3644 |
| 2721 | AAACAGAAACCCCAACCUC | 3472 | 2721 | AAACAGAAACCCCAACCUC | 3472 | 2739 | GAGGUUGGGGUUUCUGUUU | 3645 |
| 2739 | CAAUGCCAUCCGCUCUCUG | 3473 | 2739 | CAAUGCCAUCCGCUCUCUG | 3473 | 2757 | CAGAGAGCGGAUGGCAUUG | 3646 |
| 2757 | GGAGGCCGUGAUCCGGGUG | 3474 | 2757 | GGAGGCCGUGAUCCGGGUG | 3474 | 2775 | CACCCGGAUCACGGCCUCC | 3647 |
| 2775 | GCACAGUAAAUACUGGGGC | 3475 | 2775 | GCACAGUAAAUACUGGGGC | 3475 | 2793 | GCCCCAGUAUUUACUGUGC | 3648 |
| 2793 | CUGCAUGCAGCGCCUGGCC | 3476 | 2793 | CUGCAUGCAGCGCCUGGCC | 3476 | 2811 | GGCCAGGCGCUGCAUGCAG | 3649 |
| 2811 | CUCCUGUCCAGACUCCUGG | 3477 | 2811 | CUCCUGUCCAGACUCCUGG | 3477 | 2829 | CCAGGAGUCUGGACAGGAG | 3650 |
| 2829 | GGUGCCUAGAGUGCCAGGG | 3478 | 2829 | GGUGCCUAGAGUGCCAGGG | 3478 | 2847 | CCCUGGCACUCUAGGCACC | 3651 |
| 2847 | GGCUGACAAAGAAGAAGUG | 3479 | 2847 | GGCUGACAAAGAAGAAGUG | 3479 | 2865 | CACUUCUUCUUUGUCAGCC | 3652 |
| 2865 | GGAGGCAGUGACCGCACUG | 3480 | 2865 | GGAGGCAGUGACCGCACUG | 3480 | 2883 | CAGUGCGGUCACUGCCUCC | 3653 |
| 2883 | GGCGUCCCUCUCUGUGGGC | 3481 | 2883 | GGCGUCCCUCUCUGUGGGC | 3481 | 2901 | GCCCACAGAGAGGGACGCC | 3654 |
| 2901 | CAUCCUGGCUGAAGAUAGG | 3482 | 2901 | CAUCCUGGCUGAAGAUAGG | 3482 | 2919 | CCUAUCUUCAGCCAGGAUG | 3655 |
| 2919 | GCCCUCGGAGCAGCUGGUG | 3483 | 2919 | GCCCUCGGAGCAGCUGGUG | 3483 | 2937 | CACCAGCUGCUCCGAGGGC | 3656 |
| 2937 | GGAGGAGGAAGAACCUAUG | 3484 | 2937 | GGAGGAGGAAGAACCUAUG | 3484 | 2955 | CAUAGGUUCUUCCUCCUCC | 3657 |
| 2955 | GAAUCUCUAAGGCUCUGGA | 3485 | 2955 | GAAUCUCUAAGGCUCUGGA | 3485 | 2973 | UCCAGAGCCUUAGAGAUUC | 3658 |
| 2973 | AACCAUCUGCCCGCCCACC | 3486 | 2973 | AACCAUCUGCCCGCCCACC | 3486 | 2991 | GGUGGGCGGGCAGAUGGUU | 3659 |
| 2991 | CAUGCCCUUGGGACCUGGU | 3487 | 2991 | CAUGCCCUUGGGACCUGGU | 3487 | 3009 | ACCAGGUCCCAAGGGCAUG | 3660 |
| 3009 | UUCUCUUCUAACCCCUGGC | 3488 | 3009 | UUCUCUUCUAACCCCUGGC | 3488 | 3027 | GCCAGGGGUUAGAAGAGAA | 3661 |
| 3027 | CAAUAGCCCCCAUUCCUGG | 3489 | 3027 | CAAUAGCCCCCAUUCCUGG | 3489 | 3045 | CCAGGAAUGGGGGCUAUUG | 3662 |
| 3045 | GGUCUUUAGAGAUCCUGUG | 3490 | 3045 | GGUCUUUAGAGAUCCUGUG | 3490 | 3063 | CACAGGAUCUCUAAAGACC | 3663 |
| 3063 | GGGCAAGUAGUUGGAACCA | 3491 | 3063 | GGGCAAGUAGUUGGAACCA | 3491 | 3081 | UGGUUCCAACUACUUGCCC | 3664 |
| 3081 | AGAGAACAGCCUGCCUGCU | 3492 | 3081 | AGAGAACAGGGUGCCUGCU | 3492 | 3099 | AGCAGGCAGGCUGUUCUCU | 3665 |
| 3099 | UUUGACAGUUAUCCCAGGG | 3493 | 3099 | UUUGACAGUUAUCCCAGGG | 3493 | 3117 | CCCUGGGAUAACUGUCAAA | 3666 |

HIDAC8: NM_018486.1

| | | | | | | | | |
|---|---|---|---|---|---|---|---|---|
| 3 | CAGAUCUGGAAGGUGGCUG | 3779 | 3 | CAGAUCUGGAAGGUGGCUG | 3779 | 21 | CAGGCACCUUCCAGAUCUG | 3875 |
| 21 | GCGGAACGGUUUUAAGCGG | 3780 | 21 | GCGGAACGGUUUUAAGCGG | 3780 | 39 | CCGCUUAAAACCGUUCCGC | 3876 |
| 39 | GAAGAUGGAGGAGCCGGAG | 3781 | 39 | GAAGAUGGAGGAGCCGGAG | 3781 | 57 | CUCCGGCUCCUCCAUCUUC | 3877 |
| 57 | GGAACCGGCGGACAGUGGG | 3782 | 57 | GGAACCGGCGGACAGUGGG | 3782 | 75 | CCCACUGUCCGCCGGUUCC | 3878 |
| 75 | GCAGUCGCUGGUCCCGGUU | 3783 | 75 | GCAGUCGCUGGUCCCGGUU | 3783 | 93 | AAGCGGGACCAGCGACUGC | 3879 |
| 93 | UUAUAUCUAUAGUCCCGAG | 3784 | 93 | UUAUAUCUAUAGUCCCGAG | 3784 | 111 | CUCGGGACUAUAGAUAUAA | 3880 |
| 111 | GUAUGUCAGUAUGUGUGAC | 3785 | 111 | GUAUGUCAGUAUGUGUGAC | 3785 | 129 | GUCACACAUACUGACAUAC | 3881 |
| 129 | CUCCCUGGCCAAGAUCCCC | 3786 | 129 | CUCCCUGGCCAAGAUCCCC | 3786 | 147 | GGGGAUCUUGGCCAGGGAG | 3882 |
| 147 | CAAACGGGCCAGUAUGGUG | 3787 | 147 | CAAACGGGCCAGUAUGGUG | 3787 | 165 | CACCAUACUGGCCCGUUUG | 3883 |
| 165 | GCAUUCUUUGAUUGAAGCA | 3788 | 165 | GCAUUCUUUGAUUGAAGCA | 3788 | 183 | UGCUUCAAUCAAAGAAUGC | 3884 |
| 183 | AUAUGCACUGCAUAAGCAG | 3789 | 183 | AUAUGCACUGCAUAAGCAG | 3789 | 201 | CUGCUUAUGCAGUGCAUAU | 3885 |
| 201 | GAUGAGGAUAGUUAAGCCU | 3790 | 201 | GAUGAGGAUAGUUAAGCCU | 3790 | 219 | AGGCUUAACUAUCCUCAUC | 3886 |
| 219 | UAAAGUGGCCUCCAUGGAG | 3791 | 219 | UAAAGUGGCCUCCAUGGAG | 3791 | 237 | CUCCAUGGAGGCCACUUUA | 3887 |
| 237 | GGAGAUGGCCACCUUCCAC | 3792 | 237 | GGAGAUGGCCACCUUCCAC | 3792 | 255 | GUGGAAGGUGGCCAUCUCC | 3888 |
| 255 | CACUGAUGCUUAUCUGCAG | 3793 | 255 | CACUGAUGCUUAUCUGCAG | 3793 | 273 | CUGCAGAUAAGCAUCAGUG | 3889 |
| 273 | GCAUCUCCAGAAGGUCAGC | 3794 | 273 | GCAUCUCCAGAAGGUCAGC | 3794 | 291 | GCUGACCUUCUGGAGAUGC | 3890 |
| 291 | CCAAGAGGGCGAUGAUGAU | 3795 | 291 | CCAAGAGGGCGAUGAUGAU | 3795 | 309 | AUCAUCAUCGCCCUCUUGG | 3891 |
| 309 | UCAUCCGGACUCCAUAGAA | 3796 | 309 | UCAUCCGGACUCCAUAGAA | 3796 | 327 | UUCUAUGGAGUCCGGAUGA | 3892 |
| 327 | AUAUGGGCUAGGUUAUGAC | 3797 | 327 | AUAUGGGCUAGGUUAUGAC | 3797 | 345 | GUCAUAACCUAGCCCAUAU | 3893 |
| 345 | CUGCCCAGCCACUGAAGGG | 3798 | 345 | CUGCCCAGCCACUGAAGGG | 3798 | 363 | CCCUUCAGUGGCUGGGCAG | 3894 |
| 363 | GAUAUUUGACUAUGCAGCA | 3799 | 363 | GAUAUUUGACUAUGCAGCA | 3799 | 381 | UGCUGCAUAGUCAAAUAUC | 3895 |
| 381 | AGCUAUAGGAGGGGCUACG | 3800 | 381 | AGCUAUAGGAGGGGCUACG | 3800 | 399 | CGUAGCCCCUCCUAUAGCU | 3896 |
| 399 | GAUCACAGCUGCCCAAUGC | 3801 | 399 | GAUCACAGCUGCCCAAUGC | 3801 | 417 | GCAUUGGGCAGCUGUGAUC | 3897 |
| 417 | CCUGAUUGACGGAAUGUGC | 3802 | 417 | CCUGAUUGACGGAAUGUGC | 3802 | 435 | GCACAUUCCGUCAAUCAGG | 3898 |
| 435 | CAAAGUAGCAAUUAACUGG | 3803 | 435 | CAAAGUAGCAAUUAACUGG | 3803 | 453 | CCAGUUAAUUGCUACUUUG | 3899 |
| 453 | GUCUGGAGGGUGGCAUCAU | 3804 | 453 | GUCUGGAGGGUGGCAUCAU | 3804 | 471 | AUGAUGCCACCCUCCAGAC | 3900 |
| 471 | UGCAAAGAAAGAUGAAGCA | 3805 | 471 | UGCAAAGAAAGAUGAAGCA | 3805 | 489 | UGCUUCAUCUUUCUUUGCA | 3901 |
| 489 | AUCUGGUUUUUGUUAUCUC | 3806 | 489 | AUCUGGUUUUUGUUAUCUC | 3806 | 507 | GAGAUAACAAAAACCAGAU | 3902 |
| 507 | CAAUGAUGCUGUCCUGGGA | 3807 | 507 | CAAUGAUGCUGUCCUGGGA | 3807 | 525 | UCCCAGGACAGCAUCAUUG | 3903 |
| 525 | AAUAUUACGAUUGCGACGG | 3808 | 525 | AAUAUUACGAUUGCGACGG | 3808 | 543 | CCGUCGCAAUCGUAAUAUU | 3904 |
| 543 | GAAAUUUGAGCGUAUUCUC | 3809 | 543 | GAAAUUUGAGCGUAUUCUC | 3809 | 561 | GAGAAUACGCUCAAAUUUC | 3905 |
| 561 | CUACGUGGAUUUGGAUCUG | 3810 | 561 | CUACGUGGAUUUGGAUCUG | 3810 | 579 | CAGAUCCAAAUCCACGUAG | 3906 |
| 579 | GCACCAUGGAGAUGGUGUA | 3811 | 579 | GCACCAUGGAGAUGGUGUA | 3811 | 597 | UACACCAUCUCCAUGGUGC | 3907 |
| 597 | AGAAGACGCAUUCAGUUUC | 3812 | 597 | AGAAGACGCAUUCAGUUUC | 3812 | 615 | GAAACUGAAUGCGUCUUCU | 3908 |
| 615 | CACCUCCAAAGUCAUGACC | 3813 | 615 | CACCUCCAAAGUCAUGACC | 3813 | 633 | GGUCAUGACUUUGGAGGUG | 3909 |
| 633 | CGUGUCCCUGCACAAAUUC | 3814 | 633 | CGUGUCCCUGCACAAAUUC | 3814 | 651 | GAAUUUGUGCAGGGACACG | 3910 |
| 651 | CUCCCCAGGAUUUUUCCCA | 3815 | 651 | CUCCCCAGGAUUUUUCCCA | 3815 | 669 | UGGGAAAAAUCCUGGGGAG | 3911 |
| 669 | AGGAACAGGUGACGUGUCU | 3816 | 669 | AGGAACAGGUGACGUGUCU | 3816 | 687 | AGACACGUCACCUGUUCCU | 3912 |
| 687 | UGAUGUUGGCCUAGGGAAG | 3817 | 687 | UGAUGUUGGCCUAGGGAAG | 3817 | 705 | CUUCCCUAGGCCAACAUCA | 3913 |
| 705 | GGGACGGUACUACAGUGUA | 3818 | 705 | GGGACGGUACUACAGUGUA | 3818 | 723 | UACACUGUAGUACCGUCCC | 3914 |
| 723 | AAAUGUGCCCAUUCAGGAU | 3819 | 723 | AAAUGUGCCCAUUCAGGAU | 3819 | 741 | AUCCUGAAUGGGCACAUUU | 3915 |
| 741 | UGGCAUACAAGAUGAAAAA | 3820 | 741 | UGGCAUACAAGAUGAAAAA | 3820 | 759 | UUUUUCAUCUUGUAUGCCA | 3916 |
| 759 | AUAUUACCAGAUCUGUGAA | 3821 | 759 | AUAUUACCAGAUCUGUGAA | 3821 | 777 | UUCACAGAUCUGGUAAUAU | 3917 |
| 777 | AAGUGUACUAAAGGAAGUA | 3822 | 777 | AAGUGUACUAAAGGAAGUA | 3822 | 795 | UACUUCCUUUAGUACACUU | 3918 |
| 795 | AUACCAAGCCUUUAAUCCC | 3823 | 795 | AUACCAAGCCUUUAAUCCC | 3823 | 813 | GGGAUUAAAGGCUUGGUAU | 3919 |
| 813 | CAAAGCAGUGGUCUUACAG | 3824 | 813 | CAAAGCAGUGGUCUUACAG | 3824 | 831 | CUGUAAGACCACUGCUUUG | 3920 |
| 831 | GCUGGGAGCUGACACAAUA | 3825 | 831 | GCUGGGAGCUGACACAAUA | 3825 | 849 | UAUUGUGUCAGCUCCCAGC | 3921 |
| 849 | AGCUGGGGAUCGCAUGUGC | 3826 | 849 | AGCUGGGGAUCCCAUGUGC | 3826 | 867 | GCACAUGGGAUCCCCAGCU | 3922 |
| 867 | CUCCUUUAACAUGACUCCA | 3827 | 867 | CUCCUUUAACAUGACUCCA | 3827 | 885 | UGGAGUCAUGUUAAAGGAG | 3923 |
| 885 | AGUGGGAAUUGGCAAGUGU | 3828 | 885 | AGUGGGAAUUGGCAAGUGU | 3828 | 903 | ACACUUGCCAAUUCCCACU | 3924 |
| 903 | UCUUAAGUACAUCCUUCAA | 3829 | 903 | UCUUAAGUACAUCCUUCAA | 3829 | 921 | UUGAAGGAUGUACUUAAGA | 3925 |
| 921 | AUGGCAGUUGGCAACACUC | 3830 | 921 | AUGGCAGUUGGCAACACUC | 3830 | 939 | GAGUGUUGCCAACUGCCAU | 3926 |
| 939 | CAUUUUGGGAGGAGGAGGC | 3831 | 939 | CAUUUUGGGAGGAGGAGGC | 3831 | 957 | GCCUCCUCCUCCCAAAAUG | 3927 |
| 957 | CUAUAACCUUGCCAACACG | 3832 | 957 | CUAUAACCUUGCCAACACG | 3832 | 975 | CGUGUUGGCAAGGUUAUAG | 3928 |
| 975 | GGCUCGAUGCUGGACAUAC | 3833 | 975 | GGCUCGAUGCUGGACAUAC | 3833 | 993 | GUAUGUCCAGCAUGGAGCC | 3929 |
| 993 | CUUGACCGGGGUCAUCCUA | 3834 | 993 | CUUGACCGGGGUCAUCCUA | 3834 | 1011 | UAGGAUGACCCCGGUCAAG | 3930 |
| 1011 | AGGGAAAACACUAUCCUCU | 3835 | 1011 | AGGGAAAACACUAUCCUCU | 3835 | 1029 | AGAGGAUAGUGUUUUCCCU | 3931 |
| 1029 | UGAGAUCCCAGAUCAUGAG | 3836 | 1029 | UGAGAUCCCAGAUCAUGAG | 3836 | 1047 | CUCAUGAUCUGGGAUCUCA | 3932 |
| 1047 | GUUUUUCACAGCAUAUGGU | 3837 | 1047 | GUUUUUCACAGCAUAUGGU | 3837 | 1065 | ACCAUAUGCUGUGAAAAAC | 3933 |
| 1065 | UCCUGAUUAUGUGCUGGAA | 3838 | 1065 | UCCUGAUUAUGUGCUGGAA | 3838 | 1083 | UUCCAGCACAUAAUCAGGA | 3934 |
| 1083 | AAUCACGCCAAGCUGCCGG | 3839 | 1083 | AAUCACGCCAAGCUGCCGG | 3839 | 1101 | CCGGCAGCUUGGCGUGAUU | 3935 |
| 1101 | GCCAGACCGCAAUGAGCCC | 3840 | 1101 | GCCAGACCGCAAUGAGCCC | 3840 | 1119 | GGGCUCAUUGCGGUCUGGC | 3936 |
| 1119 | CCACCGAAUCCAACAAAUC | 3841 | 1119 | CCACCGAAUCCAACAAAUC | 3841 | 1137 | GAUUUGUUGGAUUCGGUGG | 3937 |
| 1137 | CCUCAACUACAUCAAAGGG | 3842 | 1137 | CCUCAACUACAUCAAAGGG | 3842 | 1155 | CCCUUUGAUGUAGUUGAGG | 3938 |
| 1155 | GAAUCUGAAGCAUGUGGUC | 3843 | 1155 | GAAUCUGAAGCAUGUGGUC | 3843 | 1173 | GACCACAUGCUUCAGAUUC | 3939 |
| 1173 | CUAGUUGACAGAAAGAGAU | 3844 | 1173 | CUAGUUGACAGAAAGAGAU | 3844 | 1191 | AUCUCUUUCUGUCAACUAG | 3940 |
| 1191 | UCAGGUUUCCAGAGCUGAG | 3845 | 1191 | UCAGGUUUCCAGAGCUGAG | 3845 | 1209 | CUCAGCUCUGGAAACCUGA | 3941 |
| 1209 | GGAGUGGUGCCUAUAAUGA | 3846 | 1209 | GGAGUGGUGCCUAUAAUGA | 3846 | 1227 | UCAUUAUAGGCACCACUCC | 3942 |
| 1227 | AAGACAGCGUGUUUAUGCA | 3847 | 1227 | AAGACAGCGUGUUUAUGCA | 3847 | 1245 | UGCAUAAACACGCUGUCUU | 3943 |
| 1245 | AAGCAGUUUGUGGAAUUUG | 3848 | 1245 | AAGCAGUUUGUGGAAUUUG | 3848 | 1263 | CAAAUUCCACAAACUGCUU | 3944 |
| 1263 | GUGACUGCAGGGAAAAUUU | 3849 | 1263 | GUGACUGCAGGGAAAAUUU | 3849 | 1281 | AAAUUUUCCCUGCAGUCAC | 3945 |
| 1281 | UGAAAGAAAUUACUUCCUG | 3850 | 1281 | UGAAAGAAAUUACUUCCUG | 3850 | 1299 | CAGGAAGUAAUUUCUUUCA | 3946 |
| 1299 | GAAAAUUUCCAAGGGGCAU | 3851 | 1299 | GAAAAUUUCCAAGGGGCAU | 3851 | 1317 | AUGCCCCUUGGAAAUUUUC | 3947 |
| 1317 | UCAAGUGGCAGCUGGCUUC | 3852 | 1317 | UCAAGUGGCAGCUGGCUUC | 3852 | 1335 | GAAGCCAGCUGCCACUUGA | 3948 |
| 1335 | CCUGGGGUGAAGAGGCAGG | 3853 | 1335 | CCUGGGGUGAAGAGGCAGG | 3853 | 1353 | CCUGCCUCUUCACCCCAGG | 3949 |
| 1353 | GCACCCCAGAGUCCUCAAC | 3854 | 1353 | GCACCCCAGAGUCCUCAAC | 3854 | 1371 | GUUGAGGACUCUGGGGUGC | 3950 |
| 1371 | CUGGACCUAGGGGAAGAAG | 3855 | 1371 | CUGGACCUAGGGGAAGAAG | 3855 | 1389 | CUUCUUCCCCUAGGUCCAG | 3951 |
| 1389 | GGAGAUAUCCCACAUUUAA | 3856 | 1389 | GGAGAUAUCCCACAUUUAA | 3856 | 1407 | UUAAAUGUGGGAUAUCUCC | 3952 |
| 1407 | AAGUUCUUAUUUAAAAAAA | 3857 | 1407 | AAGUUCUUAUUUAAAAAAA | 3857 | 1425 | UUUUUUUAAAUAAGAACUU | 3953 |
| 1425 | ACACACACACACAAAUGAA | 3858 | 1425 | ACACACACACACAAAUGAA | 3858 | 1443 | UUCAUUUGUGUGUGUGUGU | 3954 |
| 1443 | AAUUUUUAAUCUUUGAAAA | 3859 | 1443 | AAUUUUUAAUCUUUGAAAA | 3859 | 1461 | UUUUCAAAGAUUAAAAAUU | 3955 |
| 1461 | AUUAUUUUUAAGCGAAUUG | 3860 | 1461 | AUUAUUUUUAAGCGAAUUG | 3860 | 1479 | CAAUUCGCUUAAAAAUAAU | 3956 |
| 1479 | GGGGAGGGGAGUAUUUUAA | 3861 | 1479 | GGGGAGGGGAGUAUUUUAA | 3861 | 1497 | UUAAAAUACUCCCCUCCCC | 3957 |
| 1497 | AUCAUCUUAAAUGAAACAG | 3862 | 1497 | AUCAUCUUAAAUGAAACAG | 3862 | 1515 | CUGUUUCAUUUAAGAUGAU | 3958 |
| 1515 | GAUCAGAAGCUGGAUGAGA | 3863 | 1515 | GAUCAGAAGCUGGAUGAGA | 3863 | 1533 | UCUCAUCCAGCUUCUGAUC | 3959 |
| 1533 | AGCAGUCACCAGUUUGUAG | 3864 | 1533 | AGCAGUCACCAGUUUGUAG | 3864 | 1551 | CUACAAACUGGUGACUGCU | 3960 |
| 1551 | GGGCAGGAGGCAGCUGAGA | 3865 | 1551 | GGGCAGGAGGCAGCUGAGA | 3865 | 1569 | UCUCAGCUGCCUCCUGCCC | 3961 |
| 1569 | AGGCAGGGUUUGGGCCUCA | 3866 | 1569 | AGGCAGGGUUUGGGCCUCA | 3866 | 1587 | UGAGGCCCAAACCCUGCCU | 3962 |
| 1587 | AGGACCAUCCAGGUGGAGC | 3867 | 1587 | AGGACCAUCCAGGUGGAGC | 3867 | 1605 | GCUCCACCUGGAUGGUCCU | 3963 |
| 1605 | CCCUGGGAGAGAGGGUACU | 3868 | 1605 | CCCUGGGAGAGAGGGUACU | 3868 | 1623 | AGUACCCUCUCUCCCAGGG | 3964 |
| 1623 | UGAUCAGCAGACUGGGAGG | 3869 | 1623 | UGAUCAGCAGACUGGGAGG | 3869 | 1641 | CCUCCCAGUCUGCUGAUCA | 3965 |
| 1641 | GUGGGGAGAAGUCCGCUGG | 3870 | 1641 | GUGGGGAGAAGUCCGCUGG | 3870 | 1659 | CCAGCGGACUUCUCCCCAC | 3966 |
| 1659 | GUGUUGUUUUAGUGUUAUA | 3871 | 1659 | GUGUUGUUUUAGUGUUAUA | 3871 | 1677 | UAUAACACUAAAACAACAC | 3967 |
| 1677 | AUAUCUUUGGUUUUUUUAA | 3872 | 1677 | AUAUCUUUGGUUUUUUUAA | 3872 | 1695 | UUAAAAAAACCAAAGAUAU | 3968 |
| 1695 | AUAAAAUCUUUGAAAACCU | 3873 | 1695 | AUAAAAUCUUUGAAAACCU | 3873 | 1713 | AGGUUUUCAAAGAUUUUAU | 3969 |
| 1713 | UAAAAAAAAAAAAAAAAAA | 3874 | 1713 | UAAAAAAAAAAAAAAAAAA | 3874 | 1731 | UUUUUUUUUUUUUUUUUUA | 3970 |

HDAC9 transcript variant4: NM_178423.1

| | | | | | | | | |
|---|---|---|---|---|---|---|---|---|
| 3 | GGAAGAGAGGCACAGACAC | 4083 | 3 | GGAAGAGAGGCACAGACAC | 4083 | 21 | GUGUCUGUGCGUCUCUUCC | 4341 |
| 21 | CAGAUAGGAGAAGGGCACC | 4084 | 21 | CAGAUAGGAGAAGGGCACC | 4084 | 39 | GGUGCCCUUCUCCUAUCUG | 4342 |
| 39 | CGGCUGGAGCCACUUGCAG | 4085 | 39 | CGGCUGGAGCCACUUGCAG | 4085 | 57 | CUGCAAGUGGCUCCAGCCG | 4343 |
| 57 | GGACUGAGGGUUUUUGCAA | 4086 | 57 | GGACUGAGGGUUUUUGCAA | 4086 | 75 | UUGCAAAAACCCUCAGUCC | 4344 |
| 75 | ACAAAACCCUAGCAGCCUG | 4087 | 75 | ACAAAACCCUAGCAGCCUG | 4087 | 93 | CAGGCUGCUAGGGUUUUGU | 4345 |
| 93 | GAAGAACUCUAAGCCAGAU | 4088 | 93 | GAAGAACUCUAAGCCAGAU | 4088 | 111 | AUCUGGCUUAGAGUUCUUC | 4346 |
| 111 | UGGGGUGGCUGGACGAGAG | 4089 | 111 | UGGGGUGGCUGGACGAGAG | 4089 | 129 | CUCUCGUCCAGCCACCCCA | 4347 |
| 129 | GCAGCUCUUGGCUCAGCAA | 4090 | 129 | GCAGCUCUUGGCUCAGCAA | 4090 | 147 | UUGCUGAGCCAAGAGCUGC | 4348 |
| 147 | AAGAAUGCACAGUAUGAUC | 4091 | 147 | AAGAAUGCACAGUAUGAUC | 4091 | 165 | GAUCAUACUGUGCAUUCUU | 4349 |
| 165 | CAGCUCAGUGGAUGUGAAG | 4092 | 165 | CAGCUCAGUGGAUGUGAAG | 4092 | 183 | CUUCACAUCCACUGAGCUG | 4350 |
| 183 | GUCAGAAGUUCCUGUGGGC | 4093 | 183 | GUCAGAAGUUCCUGUGGGC | 4093 | 201 | GCCCACAGGAACUUCUGAC | 4351 |
| 201 | CCUGGAGCCCAUCUCACCU | 4094 | 201 | CCUGGAGCCCAUCUCACCU | 4094 | 219 | AGGUGAGAUGGGCUCCAGG | 4352 |
| 219 | UUUAGACCUAAGGACAGAC | 4095 | 219 | UUUAGACCUAAGGACAGAC | 4095 | 237 | GUCUGUCCUUAGGUCUAAA | 4353 |
| 237 | CCUCAGGAUGAUGAUGCCC | 4096 | 237 | CCUCAGGAUGAUGAUGCCC | 4096 | 255 | GGGCAUCAUCAUCCUGAGG | 4354 |
| 255 | CGUGGUGGACCCUGUUGUC | 4097 | 255 | CGUGGUGGACCCUGUUGUC | 4097 | 273 | GACAACAGGGUCCACCACG | 4355 |
| 273 | CCGUGAGAAGCAAUUGCAG | 4098 | 273 | CCGUGAGAAGCAAUUGGAG | 4098 | 291 | CUGCAAUUGCUUCUCACGG | 4356 |
| 291 | GCAGGAAUUACUUCUUAUC | 4099 | 291 | GCAGGAAUUACUUCUUAUC | 4099 | 309 | GAUAAGAAGUAAUUCCUGC | 4357 |
| 309 | CCAGCAGCAGCAACAAAUC | 4100 | 309 | CCAGCAGCAGCAACAAAUC | 4100 | 327 | GAUUUGUUGCUGCUGCUGG | 4358 |
| 327 | CCAGAAGCAGCUUCUGAUA | 4101 | 327 | CCAGAAGCAGCUUCUGAUA | 4101 | 345 | UAUCAGAAGCUGCUUCUGG | 4359 |
| 345 | AGCAGAGUUUCAGAAACAG | 4102 | 345 | AGCAGAGUUUCAGAAACAG | 4102 | 363 | CUGUUUCUGAAACUCUGCU | 4360 |
| 363 | GCAUGAGAACUUGACACGG | 4103 | 363 | GCAUGAGAACUUGACACGG | 4103 | 381 | CCGUGUCAAGUUCUCAUGC | 4361 |
| 381 | GCAGCACCAGGCUCAGCUU | 4104 | 381 | GCAGCACCAGGCUCAGCUU | 4104 | 399 | AAGCUGAGCCUGGUGCUGC | 4362 |
| 399 | UCAGGAGCAUAUCAAGGAA | 4105 | 399 | UCAGGAGCAUAUCAAGGAA | 4105 | 417 | UUCCUUGAUAUGCUCCUGA | 4363 |
| 417 | ACUUCUAGCCAUAAAACAG | 4106 | 417 | ACUUCUAGCCAUAAAACAG | 4106 | 435 | CUGUUUUAUGGCUAGAAGU | 4364 |
| 435 | GCAACAAGAACUCCUAGAA | 4107 | 435 | GCAACAAGAACUCCUAGAA | 4107 | 453 | UUCUAGGAGUUCUUGUUGC | 4365 |
| 453 | AAAGGAGCAGAAACUGGAG | 4108 | 453 | AAAGGAGCAGAAACUGGAG | 4108 | 471 | CUCCAGUUUCUGCUCCUUU | 4366 |
| 471 | GCAGCAGAGGCAAGAACAG | 4109 | 471 | GCAGCAGAGGCAAGAACAG | 4109 | 489 | CUGUUCUUGCCUCUGCUGC | 4367 |
| 489 | GGAAGUAGAGAGGCAUCGC | 4110 | 489 | GGAAGUAGAGAGGCAUCGC | 4110 | 507 | GCGAUGCCUCUCUACUUCC | 4368 |
| 507 | CAGAGAACAGCAGCUUCCU | 4111 | 507 | CAGAGAACAGCAGCUUCCU | 4111 | 525 | AGGAAGCUGCUGUUCUCUG | 4369 |
| 525 | UCCUCUCAGAGGCAAAGAU | 4112 | 525 | UCCUCUCAGAGGGAAAGAU | 4112 | 543 | AUCUUUGCCUCUGAGAGGA | 4370 |
| 543 | UAGAGGACGAGAAAGGGCA | 4113 | 543 | UAGAGGACGAGAAAGGGCA | 4113 | 561 | UGCCCUUUCUCGUCCUCUA | 4371 |
| 561 | AGUGGCAAGUACAGAAGUA | 4114 | 561 | AGUGGCAAGUACAGAAGUA | 4114 | 579 | UACUUCUGUACUUGCCACU | 4372 |
| 579 | AAAGCAGAAGCUUCAAGAG | 4115 | 579 | AAAGCAGAAGCUUCAAGAG | 4115 | 597 | CUCUUGAAGCUUCUGCUUU | 4373 |
| 597 | GUUCCUACUGAGUAAAUCA | 4116 | 597 | GUUCCUACUGAGUAAAUCA | 4116 | 615 | UGAUUUACUCAGUAGGAAC | 4374 |
| 615 | AGCAACGAAAGACACUCCA | 4117 | 615 | AGCAACGAAAGACACUCCA | 4117 | 633 | UGGAGUGUCUUUCGUUGCU | 4375 |
| 633 | AACUAAUGGAAAAAAUCAU | 4118 | 633 | AACUAAUGGAAAAAAUCAU | 4118 | 651 | AUGAUUUUUUCCAUUAGUU | 4376 |
| 651 | UUCCGUGAGCCGCCAUCCC | 4119 | 651 | UUCCGUGAGCCGCCAUCCC | 4119 | 669 | GGGAUGGCGGCUCACGGAA | 4377 |
| 669 | CAAGCUCUGGUACACGGCU | 4120 | 669 | CAAGCUCUGGUACACGGCU | 4120 | 687 | AGCCGUGUACCAGAGCUUG | 4378 |
| 687 | UGCCCACCACACAUCAUUG | 4121 | 687 | UGCCCACCACACAUCAUUG | 4121 | 705 | CAAUGAUGUGUGGUGGGCA | 4379 |
| 705 | GGAUCAAAGCUCUCCACCC | 4122 | 705 | GGAUCAAAGCUCUCCACCC | 4122 | 723 | GGGUGGAGAGCUUUGAUCC | 4380 |
| 723 | CCUUAGUGGAACAUCUCCA | 4123 | 723 | CCUUAGUGGAACAUCUCCA | 4123 | 741 | UGGAGAUGUUCCACUAAGG | 4381 |
| 741 | AUCCUACAAGUACACAUUA | 4124 | 741 | AUCCUACAAGUACACAUUA | 4124 | 759 | UAAUGUGUACUUGUAGGAU | 4382 |
| 759 | ACCAGGAGCACAAGAUGCA | 4125 | 759 | ACCAGGAGCACAAGAUGCA | 4125 | 777 | UGCAUCUUGUGCUCCUGGU | 4383 |
| 777 | AAAGGAUGAUUUCCCCCUU | 4126 | 777 | AAAGGAUGAUUUCCCCCUU | 4126 | 795 | AAGGGGGAAAUCAUCCUUU | 4384 |
| 795 | UCGAAAAACUGCCUCUGAG | 4127 | 795 | UCGAAAAACUGCCUCUGAG | 4127 | 813 | CUCAGAGGCAGUUUUUCGA | 4385 |
| 813 | GCCCAACUUGAAGGUGCGG | 4128 | 813 | GCCCAACUUGAAGGUGCGG | 4128 | 831 | CCGCACCUUCAAGUUGGGC | 4386 |
| 831 | GUCCAGGUUAAAACAGAAA | 4129 | 831 | GUCCAGGUUAAAACAGAAA | 4129 | 849 | UUUCUGUUUUAACCUGGAC | 4387 |
| 849 | AGUGGCAGAGAGGAGAAGC | 4130 | 849 | AGUGGCAGAGAGGAGAAGC | 4130 | 867 | GCUUCUCCUCUCUGCCACU | 4388 |
| 867 | CAGCCCCUUACUCAGGCGG | 4131 | 867 | CAGCCCCUUACUCAGGCGG | 4131 | 885 | CCGCCUGAGUAAGGGGCUG | 4389 |
| 885 | GAAGGAUGGAAAUGUUGUC | 4132 | 885 | GAAGGAUGGAAAUGUUGUC | 4132 | 903 | GACAACAUUUCCAUCCUUC | 4390 |
| 903 | CACUUCAUUCAAGAAGCGA | 4133 | 903 | CACUUCAUUCAAGAAGCGA | 4133 | 921 | UCGCUUCUUGAAUGAAGUG | 4391 |
| 921 | AAUGUUUGAGGUGACAGAA | 4134 | 921 | AAUGUUUGAGGUGACAGAA | 4134 | 939 | UUCUGUCACCUCAAACAUU | 4392 |
| 939 | AUCCUCAGUCAGUAGCAGU | 4135 | 939 | AUCCUCAGUCAGUAGCAGU | 4135 | 957 | ACUGCUACUGACUGAGGAU | 4393 |
| 957 | UUCUCCAGGCUCUGGUCCC | 4136 | 957 | UUCUCCAGGCUCUGGUCCC | 4136 | 975 | GGGACCAGAGCCUGGAGAA | 4394 |
| 975 | CAGUUCACCAAACAAUGGG | 4137 | 975 | CAGUUCACCAAACAAUGGG | 4137 | 993 | CCCAUUGUUUGGUGAACUG | 4395 |
| 993 | GCCAACUGGAAGUGUUACU | 4138 | 993 | GCCAACUGGAAGUGUUACU | 4138 | 1011 | AGUAACACUUCCAGUUGGC | 4396 |
| 1011 | UGAAAAUGAGACUUCGGUU | 4139 | 1011 | UGAAAAUGAGACUUCGGUU | 4139 | 1029 | AACCGAAGUCUCAUUUUCA | 4397 |
| 1029 | UUUGCCCCCUACCCCUCAU | 4140 | 1029 | UUUGCCCCCUACCCCUCAU | 4140 | 1047 | AUGAGGGGUAGGGGGCAAA | 4398 |
| 1047 | UGCCGAGCAAAUGGUUUCA | 4141 | 1047 | UGCCGAGCAAAUGGUUUCA | 4141 | 1065 | UGAAACCAUUUGCUCGGCA | 4399 |
| 1065 | ACAGCAACGCAUUCUAAUU | 4142 | 1065 | ACAGCAACGCAUUCUAAUU | 4142 | 1083 | AAUUAGAAUGCGUUGCUGU | 4400 |
| 1083 | UCAUGAAGAUUCCAUGAAC | 4143 | 1083 | UCAUGAAGAUUCCAUGAAC | 4143 | 1101 | GUUCAUGGAAUCUUCAUGA | 4401 |
| 1101 | CCUGCUAAGUCUUUAUACC | 4144 | 1101 | CCUGCUAAGUCUUUAUACC | 4144 | 1119 | GGUAUAAAGACUUAGCAGG | 4402 |
| 1119 | CUCUCCUUCUUUGCCCAAC | 4145 | 1119 | CUCUCCUUCUUUGCCCAAC | 4145 | 1137 | GUUGGGCAAAGAAGGAGAG | 4403 |
| 1137 | CAUUACCUUGGGGCUUCCC | 4146 | 1137 | CAUUACCUUGGGGCUUCCC | 4146 | 1155 | GGGAAGCCCCAAGGUAAUG | 4404 |
| 1155 | CGCAGUGCCAUCCCAGCUC | 4147 | 1155 | CGCAGUGCCAUCCCAGCUC | 4147 | 1173 | GAGCUGGGAUGGCACUGCG | 4405 |
| 1173 | CAAUGCUUCGAAUUCACUC | 4148 | 1173 | CAAUGCUUCGAAUUCACUC | 4148 | 1191 | GAGUGAAUUCGAAGCAUUG | 4406 |
| 1191 | CAAAGAAAAGCAGAAGUGU | 4149 | 1191 | CAAAGAAAAGCAGAAGUGU | 4149 | 1209 | ACACUUCUGCUUUUCUUUG | 4407 |
| 1209 | UGAGACGCAGACGCUUAGG | 4150 | 1209 | UGAGACGCAGACGCUUAGG | 4150 | 1227 | CCUAAGCGUCUGCGUCUCA | 4408 |
| 1227 | GCAAGGUGUUCCUCUGCCU | 4151 | 1227 | GCAAGGUGUUCCUCUGCCU | 4151 | 1245 | AGGCAGAGGAACACCUUGC | 4409 |
| 1245 | UGGGCAGUAUGGAGGCAGC | 4152 | 1245 | UGGGCAGUAUGGAGGCAGC | 4152 | 1263 | GCUGCCUCCAUACUGCCCA | 4410 |
| 1263 | CAUCCCGGCAUCUUCCAGC | 4153 | 1263 | CAUCCCGGCAUCUUCCAGC | 4153 | 1281 | GCUGGAAGAUGCCGGGAUG | 4411 |
| 1281 | CCACCCUCAUGUUACUUUA | 4154 | 1281 | CCACCCUCAUGUUACUUUA | 4154 | 1299 | UAAAGUAACAUGAGGGUGG | 4412 |
| 1299 | AGAGGGAAAGCCACCCAAC | 4155 | 1299 | AGAGGGAAAGCCACCCAAC | 4155 | 1317 | GUUGGGUGGCUUUCCCUCU | 4413 |
| 1317 | CAGCAGGCACCAGGGUCUC | 4156 | 1317 | CAGCAGCCACCAGGCUCUC | 4156 | 1335 | GAGAGCCUGGUGGCUGCUG | 4414 |
| 1335 | CCUGCAGCAUUUAUUAUUG | 4157 | 1335 | CCUGCAGCAUUUAUUAUUG | 4157 | 1353 | CAAUAAUAAAUGCUGCAGG | 4415 |
| 1353 | GAAAGAACAAAUGCGACAG | 4158 | 1353 | GAAAGAACAAAUGCGACAG | 4158 | 1371 | CUGUCGCAUUUGUUCUUUC | 4416 |
| 1371 | GCAAAAGCUUCUUGUAGCU | 4159 | 1371 | GCAAAAGCUUCUUGUAGCU | 4159 | 1389 | AGCUACAAGAAGCUUUUGC | 4417 |
| 1389 | UGGUGGAGUUCCCUUACAU | 4160 | 1389 | UGGUGGAGUUCCCUUACAU | 4160 | 1407 | AUGUAAGGGAACUCCACCA | 4418 |
| 1407 | UCCUCAGUCUCCCUUGGCA | 4161 | 1407 | UCCUCAGUCUCCCUUGGCA | 4161 | 1425 | UGCCAAGGGAGACUGAGGA | 4419 |
| 1425 | AACAAAAGAGAGAAUUUCA | 4162 | 1425 | AACAAAAGAGAGAAUUUCA | 4162 | 1443 | UGAAAUUCUCUCUUUUGUU | 4420 |
| 1443 | ACCUGGCAUUAGAGGUACC | 4163 | 1443 | ACCUGGCAUUAGAGGUACC | 4163 | 1461 | GGUACCUCUAAUGCCAGGU | 4421 |
| 1461 | CCACAAAUUGCCCCGUCAC | 4164 | 1461 | CCACAAAUUGCCCCGUCAC | 4164 | 1479 | GUGACGGGGCAAUUUGUGG | 4422 |
| 1479 | CAGACCCCUGAACCGAACC | 4165 | 1479 | CAGACCCCUGAACCGAACC | 4165 | 1497 | GGUUCGGUUCAGGGGUCUG | 4423 |
| 1497 | CCAGUCUGCACCUUUGCCU | 4166 | 1497 | CCAGUCUGCACCUUUGCCU | 4166 | 1515 | AGGCAAAGGUGCAGACUGG | 4424 |
| 1515 | UCAGAGCACGUUGGCUCAG | 4167 | 1515 | UCAGAGCACGUUGGCUCAG | 4167 | 1533 | CUGAGCCAACGUGCUCUGA | 4425 |
| 1533 | GCUGGUCAUUCAACAGCAA | 4168 | 1533 | GCUGGUCAUUCAACAGCAA | 4168 | 1551 | UUGCUGUUGAAUGACCAGC | 4426 |
| 1551 | ACACCAGCAAUUCUUGGAG | 4169 | 1551 | ACACCAGCAAUUCUUGGAG | 4169 | 1569 | CUCCAAGAAUUGCUGGUGU | 4427 |
| 1569 | GAAGCAGAAGCAAUACCAG | 4170 | 1569 | GAAGCAGAAGCAAUACCAG | 4170 | 1587 | CUGGUAUUGCUUCUGCUUC | 4428 |
| 1587 | GCAGCAGAUCCACAUGAAC | 4171 | 1587 | GCAGCAGAUCCACAUGAAC | 4171 | 1605 | GUUCAUGUGGAUCUGCUGC | 4429 |
| 1605 | CAAACUGCUUUCGAAAUCU | 4172 | 1605 | CAAACUGCUUUCGAAAUCU | 4172 | 1623 | AGAUUUCGAAAGCAGUUUG | 4430 |
| 1623 | UAUUGAACAACUGAAGCAA | 4173 | 1623 | UAUUGAACAACUGAAGCAA | 4173 | 1641 | UUGCUUCAGUUGUUCAAUA | 4431 |
| 1641 | ACCAGGCAGUCACCUUGAG | 4174 | 1641 | ACCAGGCAGUCACCUUGAG | 4174 | 1659 | CUCAAGGUGACUGCCUGGU | 4432 |
| 1659 | GGAAGCAGAGGAAGAGCUU | 4175 | 1659 | GGAAGCAGAGGAAGAGCUU | 4175 | 1677 | AAGCUCUUCCUCUGCUUCC | 4433 |
| 1677 | UCAGGGGGACCAGGCGAUG | 4176 | 1677 | UCAGGGGGACCAGGCGAUG | 4176 | 1695 | CAUCGCCUGGUCCCCCUGA | 4434 |
| 1695 | GCAGGAAGACAGAGCGCCC | 4177 | 1695 | GCAGGAAGACAGAGCGCCC | 4177 | 1713 | GGGCGCUCUGUCUUCCUGC | 4435 |
| 1713 | CUCUAGUGGCAACAGCACU | 4178 | 1713 | CUCUAGUGGCAACAGCACU | 4178 | 1731 | AGUGCUGUUGCCACUAGAG | 4436 |
| 1731 | UAGGAGCGACAGCAGUGCU | 4179 | 1731 | UAGGAGCGACAGCAGUGCU | 4179 | 1749 | AGCACUGCUGUCGCUCCUA | 4437 |
| 1749 | UUGUGUGGAUGACACACUG | 4180 | 1749 | UUGUGUGGAUGACACACUG | 4180 | 1767 | CAGUGUGUCAUCCACACAA | 4438 |
| 1767 | GGGACAAGUUGGGGCUGUG | 4181 | 1767 | GGGACAAGUUGGGGCUGUG | 4181 | 1785 | CACAGCCCCAACUUGUCCC | 4439 |
| 1785 | GAAGGUCAAGGAGGAACCA | 4182 | 1785 | GAAGGUCAAGGAGGAACCA | 4182 | 1803 | UGGUUCCUCCUUGACCUUC | 4440 |
| 1803 | AGUGGACAGUGAUGAAGAU | 4183 | 1803 | AGUGGACAGUGAUGAAGAU | 4183 | 1821 | AUCUUCAUCACUGUCCACU | 4441 |
| 1821 | UGCUCAGAUCCAGGAAAUG | 4184 | 1821 | UGCUCAGAUCCAGGAAAUG | 4184 | 1839 | CAUUUCCUGGAUCUGAGCA | 4442 |
| 1839 | GGAAUCUGGGGAGCAGGCU | 4185 | 1839 | GGAAUCUGGGGAGCAGGCU | 4185 | 1857 | AGCCUGCUCCCCAGAUUCC | 4443 |
| 1857 | UGCUUUUAUGCAACAGCCU | 4186 | 1857 | UGCUUUUAUGCAACAGCCU | 4186 | 1875 | AGGCUGUUGCAUAAAAGCA | 4444 |
| 1875 | UUUCCUGGAACCCACGCAC | 4187 | 1875 | UUUCCUGGAACCCACGCAC | 4187 | 1893 | GUGCGUGGGUUCCAGGAAA | 4445 |
| 1893 | CACACGUGCGCUCUCUGUG | 4188 | 1893 | CACACGUGCGCUCUCUGUG | 4188 | 1911 | CACAGAGAGCGCACGUGUG | 4446 |
| 1911 | GCGCCAAGCUCCGCUGGCU | 4189 | 1911 | GCGCCAAGCUCCGCUGGCU | 4189 | 1929 | AGCCAGCGGAGCUUGGCGC | 4447 |
| 1929 | UGCGGUUGGCAUGGAUGGA | 4190 | 1929 | UGCGGUUGGCAUGGAUGGA | 4190 | 1947 | UCCAUCCAUGCCAACCGCA | 4448 |
| 1947 | AUUAGAGAAACACCGUCUC | 4191 | 1947 | AUUAGAGAAACACCGUCUC | 4191 | 1965 | GAGACGGUGUUUCUCUAAU | 4449 |
| 1965 | CGUCUCCAGGACUCACUCU | 4192 | 1965 | GGUCUCCAGGACUCACUCU | 4192 | 1983 | AGAGUGAGUCCUGGAGACG | 4450 |
| 1983 | UUCCCCUGCUGCCUCUGUU | 4193 | 1983 | UUCCCCUGCUGCCUCUGUU | 4193 | 2001 | AACAGAGGCAGGAGGGGAA | 4451 |
| 2001 | UUUACCUCACCCAGCAAUG | 4194 | 2001 | UUUACCUCACCCAGCAAUG | 4194 | 2019 | CAUUGCUGGGUGAGGUAAA | 4452 |
| 2019 | GGACCGCCCCCUCCAGCCU | 4195 | 2019 | GGACCGCCCCCUCCAGCCU | 4195 | 2037 | AGGCUGGAGGGGGCGGUCC | 4453 |
| 2037 | UGGCUCUGCAACUGGAAUU | 4196 | 2037 | UGGCUCUGCAACUGGAAUU | 4196 | 2055 | AAUUCCAGUUGCAGAGCCA | 4454 |
| 2055 | UGCCUAUGACCCCUUGAUG | 4197 | 2055 | UGCCUAUGACCCCUUGAUG | 4197 | 2073 | CAUCAAGGGGUCAUAGGCA | 4455 |
| 2073 | GCUGAAACACCAGUGCGUU | 4198 | 2073 | GCUGAAACACCAGUGCGUU | 4198 | 2091 | AACGCACUGGUGUUUCAGC | 4456 |
| 2091 | UUGUGGCAAUUCCACCACC | 4199 | 2091 | UUGUGGCAAUUCCACCACC | 4199 | 2109 | GGUGGUGGAAUUGCCACAA | 4457 |
| 2109 | CCACCCUGAGCAUGCUGGA | 4200 | 2109 | CCACCCUGAGCAUGCUGGA | 4200 | 2127 | UCCAGCAUGCUCAGGGUGG | 4458 |
| 2127 | ACGAAUACAGAGUAUCUGG | 4201 | 2127 | ACGAAUACAGAGUAUCUGG | 4201 | 2145 | CCAGAUACUCUGUAUUCGU | 4459 |
| 2145 | GUCACGACUGCAAGAAACU | 4202 | 2145 | GUCACGACUGCAAGAAACU | 4202 | 2163 | AGUUUCUUGCAGUCGUGAC | 4460 |
| 2163 | UGGGCUGCUAAAUAAAUGU | 4203 | 2163 | UGGGCUGCUAAAUAAAUGU | 4203 | 2181 | ACAUUUAUUUAGCAGCCCA | 4461 |
| 2181 | UGAGCGAAUUCAAGGUCGA | 4204 | 2181 | UGAGCGAAUUCAAGGUCGA | 4204 | 2199 | UCGACCUUGAAUUCGCUCA | 4462 |
| 2199 | AAAAGCCAGCCUGGAGGAA | 4205 | 2199 | AAAAGCCAGCCUGGAGGAA | 4205 | 2217 | UUCCUCCAGGCUGGCUUUU | 4463 |
| 2217 | AAUACAGCUUGUUCAUUCU | 4206 | 2217 | AAUACAGCUUGUUCAUUCU | 4206 | 2235 | AGAAUGAACAAGCUGUAUU | 4464 |
| 2235 | UGAACAUCACUCACUGUUG | 4207 | 2235 | UGAACAUCACUCACUGUUG | 4207 | 2253 | CAACAGUGAGUGAUGUUCA | 4465 |
| 2253 | GUAUGGCACCAACCCCCUG | 4208 | 2253 | GUAUGGCACCAACCCCCUG | 4208 | 2271 | CAGGGGGUUGGUGCCAUAC | 4466 |
| 2271 | GGACGGACAGAAGCUGGAC | 4209 | 2271 | GGACGGACAGAAGCUGGAC | 4209 | 2289 | GUCCAGCUUCUGUCCGUCC | 4467 |
| 2289 | CCCCAGGAUACUCCUAGGU | 4210 | 2289 | CCCCAGGAUACUCCUAGGU | 4210 | 2307 | ACCUAGGAGUAUCCUGGGG | 4468 |
| 2307 | UGAUGACUCUCAAAAGUUU | 4211 | 2307 | UGAUGACUCUCAAAAGUUU | 4211 | 2325 | AAACUUUUGAGAGUCAUCA | 4469 |
| 2325 | UUUUUCCUCAUUACCUUGU | 4212 | 2325 | UUUUUCCUCAUUACCUUGU | 4212 | 2343 | ACAAGGUAAUGAGGAAAAA | 4470 |
| 2343 | UGGUGGACUUGGGGUGGAC | 4213 | 2343 | UGGUGGACUUGGGGUGGAC | 4213 | 2361 | GUCCACCCCAAGUCCACCA | 4471 |
| 2361 | CAGUGACACCAUUUGGAAU | 4214 | 2361 | CAGUGACACCAUUUGGAAU | 4214 | 2379 | AUUCCAAAUGGUGUCACUG | 4472 |
| 2379 | UGAGCUACACUCGUCCGGU | 4215 | 2379 | UGAGCUACACUCGUCCGGU | 4215 | 2397 | ACCGGAGGAGUGUAGGUCA | 4473 |
| 2397 | UGCUGCACGCAUGGCUGUU | 4216 | 2397 | UGCUGCACGCAUGGCUGUU | 4216 | 2415 | AACAGCCAUGCGUGCAGCA | 4474 |
| 2415 | UGGCUGUGUCAUCGAGCUG | 4217 | 2415 | UGGCUGUGUCAUCGAGCUG | 4217 | 2433 | CAGCUCGAUGACACAGCCA | 4475 |
| 2433 | GGCUUCCAAAGUGGCCUCA | 4218 | 2433 | GGCUUCCAAAGUGGCCUCA | 4218 | 2451 | UGAGGCCACUUUGGAAGCC | 4476 |
| 2451 | AGGAGAGCUGAAGAAUGGG | 4219 | 2451 | AGGAGAGCUGAAGAAUGGG | 4219 | 2469 | CCCAUUCUUCAGCUCUCCU | 4477 |
| 2469 | GUUUGCUGUUGUGAGGCCC | 4220 | 2469 | GUUUGCUGUUGUGAGGCCC | 4220 | 2487 | GGGCCUCACAACAGCAAAC | 4478 |
| 2487 | CCCUGGCCAUCACGCUGAA | 4221 | 2487 | CCCUGGCCAUCACGCUGAA | 4221 | 2505 | UUCAGCGUGAUGGCCAGGG | 4479 |
| 2505 | AGAAUCCACAGCCAUGGGG | 4222 | 2505 | AGAAUCCACAGCCAUGGGG | 4222 | 2523 | CCCCAUGGCUGUGGAUUCU | 4480 |
| 2523 | GUUCUGCUUUUUUAAUUCA | 4223 | 2523 | GUUCUGCUUUUUUAAUUCA | 4223 | 2541 | UGAAUUAAAAAAGCAGAAC | 4481 |
| 2541 | AGUUGCAAUUACCGCCAAA | 4224 | 2541 | AGUUGCAAUUACCGCCAAA | 4224 | 2559 | UUUGGCGGUAAUUGCAACU | 4482 |
| 2559 | AUACUUGAGAGACCAACUA | 4225 | 2559 | AUACUUGAGAGACCAACUA | 4225 | 2577 | UAGUUGGUCUCUCAAGUAU | 4483 |
| 2577 | AAAUAUAAGCAAGAUAUUG | 4226 | 2577 | AAAUAUAAGCAAGAUAUUG | 4226 | 2595 | CAAUAUCUUGCUUAUAUUU | 4484 |
| 2595 | GAUUGUAGAUCUGGAUGUU | 4227 | 2595 | GAUUGUAGAUCUGGAUGUU | 4227 | 2613 | AACAUCCAGAUCUACAAUC | 4485 |
| 2613 | UCACCAUGGAAACGGUACC | 4228 | 2613 | UCACCAUGGAAACGGUACC | 4228 | 2631 | GGUACCGUUUCCAUGGUGA | 4486 |
| 2631 | CCAGCAGGCCUUUUAUGCU | 4229 | 2631 | CCAGCAGGCCUUUUAUGCU | 4229 | 2649 | AGCAUAAAAGGCCUGCUGG | 4487 |
| 2649 | UGACCCCAGGAUCCUGUAC | 4230 | 2649 | UGACCCCAGCAUCCUGUAC | 4230 | 2667 | GUACAGGAUGCUGGGGUCA | 4488 |
| 2667 | CAUUUCACUCCAUCGCUAU | 4231 | 2667 | CAUUUCACUCCAUCGCUAU | 4231 | 2685 | AUAGCGAUGGAGUGAAAUG | 4489 |
| 2685 | UGAUGAAGGGAACUUUUUC | 4232 | 2685 | UGAUGAAGGGAACUUUUUC | 4232 | 2703 | GAAAAAGUUCCCUUCAUCA | 4490 |
| 2703 | CCCUGGCAGUGGAGCCCCA | 4233 | 2703 | CCCUGGCAGUGGAGCCCCA | 4233 | 2721 | UGGGGCUCCACUGCCAGGG | 4491 |
| 2721 | AAAUGAGGUUGGAACAGGC | 4234 | 2721 | AAAUGAGGUUGGAACAGGC | 4234 | 2739 | GCCUGUUCCAACCUCAUUU | 4492 |
| 2739 | CCUUGGAGAAGGGUACAAU | 4235 | 2739 | CCUUGGAGAAGGGUACAAU | 4235 | 2757 | AUUGUACCCUUCUCCAAGG | 4493 |
| 2757 | UAUAAAUAUUGCCUGGACA | 4236 | 2757 | UAUAAAUAUUGCCUGGACA | 4236 | 2775 | UGUCCAGGCAAUAUUUAUA | 4494 |
| 2775 | AGGUGGCCUUGAUCCUCCC | 4237 | 2775 | AGGUGGCCUUGAUCCUCCC | 4237 | 2793 | GGGAGGAUCAAGGCCACCU | 4495 |
| 2793 | CAUGGGAGAUGUUGAGUAC | 4238 | 2793 | CAUGGGAGAUGUUGAGUAC | 4238 | 2811 | GUACUCAACAUCUCCCAUG | 4496 |
| 2811 | CCUUGAAGCAUUCAGGACC | 4239 | 2811 | CCUUGAAGCAUUCAGGACC | 4239 | 2829 | GGUCCUGAAUGCUUCAAGG | 4497 |
| 2829 | CAUCGUGAAGCCUGUGGCC | 4240 | 2829 | CAUCGUGAAGCCUGUGGCC | 4240 | 2847 | GGCCACAGGCUUCACGAUG | 4498 |
| 2847 | CAAAGAGUUUGAUCCAGAC | 4241 | 2847 | CAAAGAGUUUGAUCCAGAC | 4241 | 2865 | GUCUGGAUCAAACUCUUUG | 4499 |
| 2865 | CAUGGUCUUAGUAUCUGCU | 4242 | 2865 | CAUGGUCUUAGUAUCUGCU | 4242 | 2883 | AGCAGAUACUAAGACCAUG | 4500 |
| 2883 | UGGAUUUGAUGCAUUGGAA | 4243 | 2883 | UGGAUUUGAUGCAUUGGAA | 4243 | 2901 | UUCCAAUGCAUCAAAUCCA | 4501 |
| 2901 | AGGCCACACCCCUCCUCUA | 4244 | 2901 | AGGCCACACCCCUCCUCUA | 4244 | 2919 | UAGAGGAGGGGUGUGGCCU | 4502 |
| 2919 | AGGAGGGUACAAAGUGACG | 4245 | 2919 | AGGAGGGUACAAAGUGACG | 4245 | 2937 | CGUCACUUUGUACCCUCCU | 4503 |
| 2937 | GGCAAAAUGUUUUGGUCAU | 4246 | 2937 | GGCAAAAUGUUUUGGUCAU | 4246 | 2955 | AUGACCAAAACAUUUUGCC | 4504 |
| 2955 | UUUGACGAAGCAAUUGAUG | 4247 | 2955 | UUUGACGAAGCAAUUGAUG | 4247 | 2973 | CAUCAAUUGCUUCGUCAAA | 4505 |
| 2973 | GACAUUGGCUGAUGGACGU | 4248 | 2973 | GACAUUGGCUGAUGGACGU | 4248 | 2991 | ACGUCCAUCAGCCAAUGUC | 4506 |
| 2991 | UGUGGUGUUGGCUCUAGAA | 4249 | 2991 | UGUGGUGUUGGCUCUAGAA | 4249 | 3009 | UUCUAGAGCCAACACCACA | 4507 |
| 3009 | AGGAGGACAUGAUCUCACA | 4250 | 3009 | AGGAGGACAUGAUCUCACA | 4250 | 3027 | UGUGAGAUCAUGUCCUCCU | 4508 |
| 3027 | AGCCAUCUGUGAUGCAUCA | 4251 | 3027 | AGCCAUCUGUGAUGCAUCA | 4251 | 3045 | UGAUGCAUCACAGAUGGCU | 4509 |
| 3045 | AGAAGCCUGUGUAAAUGCC | 4252 | 3045 | AGAAGCCUGUGUAAAUGCC | 4252 | 3063 | GGCAUUUACACAGGCUUCU | 4510 |
| 3063 | CCUUCUAGGAAAUGAGCUG | 4253 | 3063 | CCUUCUAGGAAAUGAGCUG | 4253 | 3081 | CAGCUCAUUUCCUAGAAGG | 4511 |
| 3081 | GGAGCCACUUGCAGAAGAU | 4254 | 3081 | GGAGCCACUUGCAGAAGAU | 4254 | 3099 | AUCUUCUGCAAGUGGCUCC | 4512 |
| 3099 | UAUUCUCCACCAAAGCCCG | 4255 | 3099 | UAUUCUCCACCAAAGCCCG | 4255 | 3117 | CGGGCUUUGGUGGAGAAUA | 4513 |
| 3117 | GAAUAUGAAUGCUGUUAUU | 4256 | 3117 | GAAUAUGAAUGCUGUUAUU | 4256 | 3135 | AAUAACAGCAUUCAUAUUC | 4514 |
| 3135 | UUCUUUACAGAAGAUCAUU | 4257 | 3135 | UUCUUUACAGAAGAUCAUU | 4257 | 3153 | AAUGAUCUUCUGUAAAGAA | 4515 |
| 3153 | UGAAAUUCAAAGCAAGUAU | 4258 | 3153 | UGAAAUUCAAAGCAAGUAU | 4258 | 3171 | AUACUUGCUUUGAAUUUCA | 4516 |
| 3171 | UUGGAAGUCAGUAAGGAUG | 4259 | 3171 | UUGGAAGUCAGUAAGGAUG | 4259 | 3189 | CAUCCUUACUGACUUCCAA | 4517 |
| 3189 | GGUGGCUGUGCCAAGGGGC | 4260 | 3189 | GGUGGCUGUGCCAAGGGGC | 4260 | 3207 | GCCCCUUGGCACAGCCACC | 4518 |
| 3207 | CUGUGCUCUGGCUGGUGCU | 4261 | 3207 | CUGUGCUCUGGCUGGUGCU | 4261 | 3225 | AGCACCAGCCAGAGCACAG | 4519 |
| 3225 | UCAGUUGCAAGAGGAGACA | 4262 | 3225 | UCAGUUGCAAGAGGAGACA | 4262 | 3243 | UGUCUCCUCUUGCAACUGA | 4520 |
| 3243 | AGAGACCGUUUCUGCCCUG | 4263 | 3243 | AGAGACCGUUUCUGCCCUG | 4263 | 3261 | CAGGGCAGkAACGGUCUCU | 4521 |
| 3261 | GGCCUCCCUAACAGUGGAU | 4264 | 3261 | GGCCUCCCUAACAGUGGAU | 4264 | 3279 | AUCCACUGUUAGGGAGGCC | 4522 |
| 3279 | UGUGGAACAGCCCUUUGCU | 4265 | 3279 | UGUGGAACAGCCCUUUGCU | 4265 | 3297 | AGCAAAGGGCUGUUCCACA | 4523 |
| 3297 | UCAGGAAGACAGCAGAACU | 4266 | 3297 | UCAGGAAGACAGCAGAACU | 4266 | 3315 | AGUUCUGCUGUCUUCCUGA | 4524 |
| 3315 | UGCUGGUGAGCCUAUGGAA | 4267 | 3315 | UGCUGGUGAGCCUAUGGAA | 4267 | 3333 | UUCCAUAGGCUCACCAGCA | 4525 |
| 3333 | AGAGGAGCCAGCCUUGUGA | 4268 | 3333 | AGAGGAGCCAGCCUUGUGA | 4268 | 3351 | UCACAAGGCUGGCUCCUCU | 4526 |
| 3351 | AAGUGCCAAGUCCCCCUCU | 4269 | 3351 | AAGUGCCAAGUCCCCCUCU | 4269 | 3369 | AGAGGGGGACUUGGCACUU | 4527 |
| 3369 | UGAUAUUUCCUGUGUGUGA | 4270 | 3369 | UGAUAUUUCCUGUGUGUGA | 4270 | 3387 | UCACACACAGGAAAUAUCA | 4528 |
| 3387 | ACAUCAUUGUGUAUCCCCC | 4271 | 3387 | ACAUCAUUGUGUAUCCCCC | 4271 | 3405 | GGGGGAUACACAAUGAUGU | 4529 |
| 3405 | CCACCCCAGUACCCUCAGA | 4272 | 3405 | CCACCCCAGUACCCUCAGA | 4272 | 3423 | UCUGAGGGUACUGGGGUGG | 4530 |
| 3423 | ACAUGUCUUGUCUGCUGCC | 4273 | 3423 | ACAUGUCUUGUCUGCUGCC | 4273 | 3441 | GGCAGCAGACAAGACAUGU | 4531 |
| 3441 | CUGGGUGGCACAGAUUCAA | 4274 | 3441 | CUGGGUGGCACAGAUUCAA | 4274 | 3459 | UUGAAUCUGUGCCACCCAG | 4532 |
| 3459 | AUGGAACAUAAACACUGGG | 4275 | 3459 | AUGGAACAUAAACACUGGG | 4275 | 3477 | CCCAGUGUUUAUGUUCCAU | 4533 |
| 3477 | GCACAAAAUUCUGAACAGC | 4276 | 3477 | GCACAAAAUUCUGAACAGC | 4276 | 3495 | GCUGUUCAGAAUUUUGUGC | 4534 |
| 3495 | CAGCUUCACUUGUUCUUUG | 4277 | 3495 | CAGCUUCACUUGUUCUUUG | 4277 | 3513 | CAAAGAACAAGUGAAGCUG | 4535 |
| 3513 | GGAUGGACUUGAAAGGGCA | 4278 | 3513 | GGAUGGACUUGAAAGGGCA | 4278 | 3531 | UGCCCUUUCAAGUCCAUCC | 4536 |
| 3531 | AUUAAAGAUUCCUUAAACG | 4279 | 3531 | AUUAAAGAUUCCUUAAACG | 4279 | 3549 | CGUUUAAGGAAUCUUUAAU | 4537 |
| 3549 | GUAACCGCUGUGAUUCUAG | 4280 | 3549 | GUAACCGCUGUGAUUCUAG | 4280 | 3567 | CUAGAAUCACAGCGGUUAC | 4538 |
| 3567 | GAGUUACAGUAAACCACGA | 4281 | 3567 | GAGUUACAGUAAACCACGA | 4281 | 3585 | UCGUGGUUUACUGUAACUC | 4539 |
| 3585 | AUUGGAAGAAACUGCUUCC | 4282 | 3585 | AUUGGAAGAAACUGCUUCC | 4282 | 3603 | GGAAGCAGUUUCUUCCAAU | 4540 |
| 3603 | CAGCAUGCUUUUAAUAUGC | 4283 | 3603 | CAGCAUGCUUUUAAUAUGC | 4283 | 3621 | GCAUAUUAAAAGCAUGCUG | 4541 |
| 3621 | CUGGGUGACCCACUCCUAG | 4284 | 3621 | CUGGGUGACCCACUCCUAG | 4284 | 3639 | CUAGGAGUGGGUCACCCAG | 4542 |
| 3639 | GACACCAAGUUUGAACUAG | 4285 | 3639 | GACACCAAGUUUGAACUAG | 4285 | 3657 | CUAGUUCAAACUUGGUGUC | 4543 |
| 3657 | GAAACAUUCAGUACAGCAC | 4286 | 3657 | GAAACAUUCAGUACAGCAC | 4286 | 3675 | GUGCUGUACUGAAUGUUUC | 4544 |
| 3675 | CUAGAUAUUGUUAAUUUCA | 4287 | 3675 | CUAGAUAUUGUUAAUUUCA | 4287 | 3693 | UGAAAUUAACAAUAUCUAG | 4545 |
| 3693 | AGAAGCUAUGACAGCCAGU | 4288 | 3693 | AGAAGCUAUGACAGCCAGU | 4288 | 3711 | ACUGGCUGUCAUAGCUUCU | 4546 |
| 3711 | UGAAAUUUUGGGCAAAACC | 4289 | 3711 | UGAAAUUUUGGGCAAAACC | 4289 | 3729 | GGUUUUGCCCAAAAUUUCA | 4547 |
| 3729 | CUGAGACAUAGUCAUUCCU | 4290 | 3729 | CUGAGACAUAGUCAUUCCU | 4290 | 3747 | AGGAAUGACUAUGUCUCAG | 4548 |
| 3747 | UGACAUUCUGAUCAGCUUU | 4291 | 3747 | UGACAUUCUGAUCAGCUUU | 4291 | 3765 | AAAGCUGAUCAGAAUGUCA | 4549 |
| 3765 | UUUUUGGGGUAAUUUGUUU | 4292 | 3765 | UUUUUGGGGUAAUUUGUUU | 4292 | 3783 | AAACAAAUUACCCCAAAAA | 4550 |
| 3783 | UUUCAAACAGUCUUAACUU | 4293 | 3783 | UUUCAAACAGUCUUAACUU | 4293 | 3801 | AAGUUAAGACUGUUUGAAA | 4551 |
| 3801 | UGUUUACAAGAUUUGCUUU | 4294 | 3801 | UGUUUACAAGAUUUGCUUU | 4294 | 3819 | AAAGCAAAUCUUGUAAACA | 4552 |
| 3819 | UUAGCUAUGAACGGAUCGU | 4295 | 3819 | UUAGCUAUGAACGGAUCGU | 4295 | 3837 | ACGAUCCGUUCAUAGCUAA | 4553 |
| 3837 | UAAUUCCACCCAGAAUGUA | 4296 | 3837 | UAAUUCCACCCAGAAUGUA | 4296 | 3855 | UACAUUCUGGGUGGAAUUA | 4554 |
| 3855 | AAUGUUUCUUGUUUGUUUG | 4297 | 3855 | AAUGUUUCUUGUUUGUUUG | 4297 | 3873 | CAAACAAACAAGAAACAUU | 4555 |
| 3873 | GUUUUGUUUUGUUAGGGUU | 4298 | 3873 | GUUUUGUUUUGUUAGGGUU | 4298 | 3891 | AACCCUAACPAAACAAAAC | 4556 |
| 3891 | UUUUUUCUCAACUUUAACA | 4299 | 3891 | UUUUUUCUCAACUUUAACA | 4299 | 3909 | UGUUAAAGUUGAGAAAAAA | 4557 |
| 3909 | ACACAGUUCAACUGUUCCU | 4300 | 3909 | ACACAGUUCAACUGUUCCU | 4300 | 3927 | AGGAACAGUUGAACUGUGU | 4558 |
| 3927 | UAGUAAAAGUUCAAGAUGG | 4301 | 3927 | UAGUAAAAGUUCAAGAUGG | 4301 | 3945 | CCAUCUUGAACUUUUACUA | 4559 |
| 3945 | GAGGAACUAGCAUGAGGCU | 4302 | 3945 | GAGGAACUAGCAUGAGGCU | 4302 | 3963 | AGCCUCAUGGUAGUUCCUC | 4560 |
| 3963 | UUUUUUCAGUAUCUCGAAG | 4303 | 3963 | UUUUUUCAGUAUCUCGAAG | 4303 | 3981 | CUUCGAGAUACUGAAAAAA | 4561 |
| 3981 | GUCCAAAUGCCAAAGGAAC | 4304 | 3981 | GUCCAAAUGCCAAAGGAAC | 4304 | 3999 | GUUCCUUUGGCAUUUGGAC | 4562 |
| 3999 | CCUCACACACUGUUUGUAA | 4305 | 3999 | CCUCACACACUGUUUGUAA | 4305 | 4017 | UUACAAACAGUGUGUGAGG | 4563 |
| 4017 | AUGGUGCAAUAUUUUAUAU | 4306 | 4017 | AUGGUGCAAUAUUUUAUAU | 4306 | 4035 | AUAUAAAAUAUUGCACCAU | 4564 |
| 4035 | UCACUUUUUUUUAAACAUC | 4307 | 4035 | UCACUUUUUUUUAAACAUC | 4307 | 4053 | GAUGUUUAAAAAAAAGUGA | 4565 |
| 4053 | CCCCAACAUCUUUGUGUUC | 4308 | 4053 | CCCCAACAUCUUUGUGUUC | 4308 | 4071 | GAACACAAAGAUGUUGGGG | 4566 |
| 4071 | CUCACACACAGGCAAUUUG | 4309 | 4071 | CUCACACACAGGCAAUUUG | 4309 | 4089 | CAAAUUGCCUGUGUGUGAG | 4567 |
| 4089 | GCAAUGUUGCAAUUGUGUU | 4310 | 4089 | GCAAUGUUGCAAUUGUGUU | 4310 | 4107 | AACACAAUUGCAACAUUGC | 4568 |
| 4107 | UGGAGAAUGAAGUCCCCCC | 4311 | 4107 | UGGAGAAUGAAGUCCCCCC | 4311 | 4125 | GGGGGGACUUCAUUCUCCA | 4569 |
| 4125 | CACCUCCCAGCCACACACA | 4312 | 4125 | CACCUCCCAGCCACACACA | 4312 | 4143 | UGUGUGUGGCUGGGAGGUG | 4570 |
| 4143 | ACAUCCUUUGUUCUCAUGA | 4313 | 4143 | ACAUCCUUUGUUCUCAUGA | 4313 | 4161 | UCAUGAGAACAAAGGAUGU | 4571 |
| 4161 | ACAGUAGGUCUGAGCAAAU | 4314 | 4161 | ACAGUAGGUCUGAGCAAAU | 4314 | 4179 | AUUUGCUCAGACCUACUGU | 4572 |
| 4179 | UGUUCCACCAAGCAUUUUC | 4315 | 4179 | UGUUCCACCAAGCAUUUUC | 4315 | 4197 | GAAAAUGCUUGGUGGAACA | 4573 |
| 4197 | CAGUGUCUUUGAAAAGCAC | 4316 | 4197 | CAGUGUCUUUGAAAAGCAC | 4316 | 4215 | GUGCUUUUCAAAGACACUG | 4574 |
| 4215 | CGUAACUUUUCAAAGGUGG | 4317 | 4215 | CGUAACUUUUCAAAGGUGG | 4317 | 4233 | CCACCUUUGAAAAGUUACG | 4575 |
| 4233 | GUCUUAAUUUGUUGCAUAU | 4318 | 4233 | GUCUUAAUUUGUUGCAUAU | 4318 | 4251 | AUAUGCAACAAAUUAAGAC | 4576 |
| 4251 | UCUAUCAAGGACUUAUUCA | 4319 | 4251 | UCUAUCAAGGACUUAUUCA | 4319 | 4269 | UGAAUAAGUCCUUGAUAGA | 4577 |
| 4269 | ACUCACCUUUCCUUUUCUG | 4320 | 4269 | ACUCACCUUUCCUUUUCUG | 4320 | 4287 | CAGAAAAGGAAAGGUGAGU | 4578 |
| 4287 | GCCCUCUAUCAAUUGAUUU | 4321 | 4287 | GCCCUCUAUCAAUUGAUUU | 4321 | 4305 | AAAUCAAUUGAUAGAGGGC | 4579 |
| 4305 | UCUUCUUACCUUUCAUCAU | 4322 | 4305 | UCUUCUUACCUUUCAUCAU | 4322 | 4323 | AUGAUGAAAGGUAAGAAGA | 4580 |
| 4323 | UUCAUUCCUUCCUUUAGAA | 4323 | 4323 | UUCAUUCCUUCCUUUAGAA | 4323 | 4341 | UUCUAAAGGAAGGAAUGAA | 4581 |
| 4341 | AAAACUGAAGAUUACCCAU | 4324 | 4341 | AAAACUGAAGAUUACCCAU | 4324 | 4359 | AUGGGUAAUCUUCAGUUUU | 4582 |
| 4359 | UAAUCUCCUCUUAUUACUU | 4325 | 4359 | UAAUCUCCUCUUAUUACUU | 4325 | 4377 | AAGUAAUAAGAGGAGAUUA | 4583 |
| 4377 | UGAGGGCCUUGACUAUUUA | 4326 | 4377 | UGAGGGCCUUGACUAUUUA | 4326 | 4395 | UAAAUAGUCAAGGCCCUCA | 4584 |
| 4395 | AGUUUAUUUUGUUUACUUU | 4327 | 4395 | AGUUUAUUUUGUUUACUUU | 4327 | 4413 | AAAGUAAACAAAAUAAACU | 4585 |
| 4413 | UACAGGUUAACACAGUUGU | 4328 | 4413 | UACAGGUUAACACAGUUGU | 4328 | 4431 | ACAACUGUGUUAACCUGUA | 4586 |
| 4431 | UUUUGUCUGAUUGCAUUUU | 4329 | 4431 | UUUUGUCUGAUUGCAUUUU | 4329 | 4449 | AAAAUGCAAUCAGACAAAA | 4587 |
| 4449 | UAUUAACUGUGAAGCCGUU | 4330 | 4449 | UAUUAACUGUGAAGCCGUU | 4330 | 4467 | AACGGCUUCACAGUUAAUA | 4588 |
| 4467 | UGAAAUGAAUAUCACUUAA | 4331 | 4467 | UGAAAUGAAUAUCACUUAA | 4331 | 4485 | UUAAGUGAUAUUCAUUUCA | 4589 |
| 4485 | AGCAACGUUGCUAAAUUUC | 4332 | 4485 | AGCAACGUUGCUAAAUUUC | 4332 | 4503 | GAAAUUUAGCAACGUUGCU | 4590 |
| 4503 | CUAUGUGUUUGAAAUGUGU | 4333 | 4503 | CUAUGUGUUUGAAAUGUGU | 4333 | 4521 | ACACAUUUCAAACACAUAG | 4591 |
| 4521 | UUAAUGAAGGCACUGCUUA | 4334 | 4521 | UUAAUGAAGGCACUGCUUA | 4334 | 4539 | UAAGCAGUGCCUUCAUUAA | 4592 |
| 4539 | AUUUGUAGUCACCUUGAAC | 4335 | 4539 | AUUUGUAGUCACCUUGAAC | 4335 | 4557 | GUUCAAGGUGACUACAAAU | 4593 |
| 4557 | CUGACUUAACCUAGAAGCU | 4336 | 4557 | CUGACUUAACCUAGAAGCU | 4336 | 4575 | AGCUUCUAGGUUAAGUCAG | 4594 |
| 4575 | UGUGCCUUCUUGUGAAAAA | 4337 | 4575 | UGUGCCUUCUUGUGAAAAA | 4337 | 4593 | UUUUUCACAAGAAGGCACA | 4595 |
| 4593 | AAAAAAAAAACAAAAACAA | 4338 | 4593 | AAAAAAAAAACAAAAACAA | 4338 | 4611 | UUGUUUUUGUUUUUUUUUU | 4596 |
| 4611 | AAAAACAGCCUUUAAACAA | 4339 | 4611 | AAAAACAGCCUUUAAACAA | 4339 | 4629 | UUGUUUAAAGGCUGUUUUU | 4597 |
| 4629 | AGUUUCCUUAGUGUCAAAA | 4340 | 4629 | AGUUUCCUUAGUGUCAAAA | 4340 | 4647 | UUUUGACACUAAGGAAACU | 4598 |

HDAC11: NM_024827.1

| | | | | | | | | |
|---|---|---|---|---|---|---|---|---|
| 3 | CUUUGGGAGGGCCGGCCCC | 4711 | 3 | CUUUGGGAGGGCCGGCCCC | 4711 | 21 | GGGGCCGGCCCUCCCAAAG | 4808 |
| 21 | CGGGAUGCUACACACAACC | 4712 | 21 | CGGGAUGCUACACACAACC | 4712 | 39 | GGUUGUGUGUAGCAUCCCG | 4809 |
| 39 | CCAGGUGUACCAGGAUGUG | 4713 | 39 | CCAGCUGUACCAGCAUGUG | 4713 | 57 | CACAUGCUGGUACAGCUGG | 4810 |
| 57 | GCCAGAGACACCCUGGCCA | 4714 | 57 | GCCAGAGACACCCUGGCCA | 4714 | 75 | UGGCCAGGGUGUCUCUGGC | 4811 |
| 75 | AAUCGUGUACUCGCCGCGC | 4715 | 75 | AAUCGUGUACUCGCCGCGC | 4715 | 93 | GCGCGGCGAGUACACGAUU | 4812 |
| 93 | CUACAACAUCACCUUCAUG | 4716 | 93 | CUACAACAUCACCUUCAUG | 4716 | 111 | CAUGAAGGUGAUGUUGUAG | 4813 |
| 111 | GGGCCUGGAGAAGCUGCAU | 4717 | 111 | GGGCCUGGAGAAGCUGCAU | 4717 | 129 | AUGCAGCUUCUCCAGGCCC | 4814 |
| 129 | UCCCUUUGAUGCCGGAAAA | 4718 | 129 | UCCCUUUGAUGCCGGAAAA | 4718 | 147 | UUUUCCGGCAUCAAAGGGA | 4815 |
| 147 | AUGGGGCAAAGUGAUCAAU | 4719 | 147 | AUGGGGCAAAGUGAUCAAU | 4719 | 165 | AUUGAUCACUUUGCCCCAU | 4816 |
| 165 | UUUCCUAAAAGAAGAGAAG | 4720 | 165 | UUUCCUAAAAGAAGAGAAG | 4720 | 183 | CUUCUCUUCUUUUAGGAAA | 4817 |
| 183 | GCUUCUGUCUGACAGCAUG | 4721 | 183 | GCUUCUGUCUGACAGCAUG | 4721 | 201 | CAUGCUGUCAGACAGAAGC | 4818 |
| 201 | GCUGGUGGAGGCGCGGGAG | 4722 | 201 | GCUGGUGGAGGCGCGGGAG | 4722 | 219 | CUCCCGCGCCUCCACCAGC | 4819 |
| 219 | GGCCUCGGAGGAGGACCUG | 4723 | 219 | GGCCUCGGAGGAGGACCUG | 4723 | 237 | CAGGUCCUCCUCCGAGGCC | 4820 |
| 237 | GCUGGUGGUGCACACGAGG | 4724 | 237 | GCUGGUGGUGCACACGAGG | 4724 | 255 | CCUCGUGUGCACCACCAGC | 4821 |
| 255 | GCGCUAUCUUAAUGAGCUC | 4725 | 255 | GCGCUAUCUUAAUGAGCUC | 4725 | 273 | GAGCUCAUUAAGAUAGCGC | 4822 |
| 273 | CAAGUGGUCCUUUGCUGUU | 4726 | 273 | CAAGUGGUCCUUUGCUGUU | 4726 | 291 | AACAGCAAAGGACCACUUG | 4823 |
| 291 | UGCUACCAUCACAGAAAUC | 4727 | 291 | UGCUACCAUCACAGAAAUC | 4727 | 309 | GAUUUCUGUGAUGGUAGCA | 4824 |
| 309 | CCCCCCCGUUAUCUUCCUC | 4728 | 309 | CCCCCCCGUUAUCUUCCUC | 4728 | 327 | GAGGAAGAUAACGGGGGGG | 4825 |
| 327 | CCCCAACUUCCUUGUGCAG | 4729 | 327 | CCCCAACUUCCUUGUGCAG | 4729 | 345 | CUGCACAAGGAAGUUGGGG | 4826 |
| 345 | GAGGAAGGUGCUGAGGCCC | 4730 | 345 | GAGGAAGGUGCUGAGGCCC | 4730 | 363 | GGGCCUCAGCACCUUCCUC | 4827 |
| 363 | CCUUCGGACCCAGACAGGA | 4731 | 363 | CCUUCGGACCCAGACAGGA | 4731 | 381 | UCCUGUCUGGGUCCGAAGG | 4828 |
| 381 | AGGAACCAUAAUGGCGGGG | 4732 | 381 | AGGAACCAUAAUGGCGGGG | 4732 | 399 | CCCCGCCAUUAUGGUUCCU | 4829 |
| 399 | GAAGCUGGCUGUGGAGCGA | 4733 | 399 | GAAGCUGGCUGUGGAGCGA | 4733 | 417 | UCGCUCCACAGCCAGCUUC | 4830 |
| 417 | AGGCUGGGCCAUCAACGUG | 4734 | 417 | AGGCUGGGCCAUCAACGUG | 4734 | 435 | CACGUUGAUGGCCCAGCCU | 4831 |
| 435 | GGGGGGUGGCUUCCACCAC | 4735 | 435 | GGGGGGUGGCUUCCACCAC | 4735 | 453 | GUGGUGGAAGCCACCCCCC | 4832 |
| 453 | CUGCUCCAGCGACCGUGGC | 4736 | 453 | CUGCUCCAGCGACCGUGGC | 4736 | 471 | GCCACGGUCGCUGGAGCAG | 4833 |
| 471 | CGGGGGCUUCUGUGCCUAU | 4737 | 471 | CGGGGGCUUCUGUGCCUAU | 4737 | 489 | AUAGGCACAGAAGCCCCCG | 4834 |
| 489 | UGCGGACAUCACGCUCGCC | 4738 | 489 | UGCGGACAUCACGCUCGCC | 4738 | 507 | GGCGAGCGUGAUGUCCGCA | 4835 |
| 507 | CAUCAAGUUUCUGUUUGAG | 4739 | 507 | CAUCAAGUUUCUGUUUGAG | 4739 | 525 | CUCAAACAGAAACUUGAUG | 4836 |
| 525 | GCGUGUGGAGGGCAUCUCC | 4740 | 525 | GCGUGUGGAGGGCAUCUCC | 4740 | 543 | GGAGAUGCCCUCCACACGC | 4837 |
| 543 | CAGGGCUACCAUCAUUGAU | 4741 | 543 | CAGGGCUACCAUCAUUGAU | 4741 | 561 | AUCAAUGAUGGUAGCCCUG | 4838 |
| 561 | UCUUGAUGCCCAUCAGGGC | 4742 | 561 | UCUUGAUGCCCAUCAGGGC | 4742 | 579 | GCCCUGAUGGGCAUCAAGA | 4839 |
| 579 | CAAUGGGCAUGAGCGAGAC | 4743 | 579 | CAAUGGGCAUGAGCGAGAC | 4743 | 597 | GUCUCGCUCAUGCCCAUUG | 4840 |
| 597 | CUUCAUGGACGACAAGCGU | 4744 | 597 | CUUCAUGGACGACAAGCGU | 4744 | 615 | ACGCUUGUCGUCCAUGAAG | 4841 |
| 615 | UGUGUACAUCAUGGAUGUC | 4745 | 615 | UGUGUACAUCAUGGAUGUC | 4745 | 633 | GACAUCCAUGAUGUACACA | 4842 |
| 633 | CUACAACCGCCACAUCUAC | 4746 | 633 | CUACAACCGCCACAUCUAC | 4746 | 651 | GUAGAUGUGGCGGUUGUAG | 4843 |
| 651 | CCCAGGGGACCGCUUUGCC | 4747 | 651 | CCCAGGGGACCGCUUUGCC | 4747 | 669 | GGCAAAGCGGUCCCCUGGG | 4844 |
| 669 | CAAGCAGGCCAUCAGGCGG | 4748 | 669 | CAAGCAGGCCAUCAGGCGG | 4748 | 687 | CCGCCUGAUGGCCUGCUUG | 4845 |
| 687 | GAAGGUGGAGCUGGAGUGG | 4749 | 687 | GAAGGUGGAGCUGGAGUGG | 4749 | 705 | CCACUCCAGCUCCACCUUC | 4846 |
| 705 | GGGCACAGAGGAUGAUGAG | 4750 | 705 | GGGCACAGAGGAUGAUGAG | 4750 | 723 | CUCAUCAUCCUCUGUGCCC | 4847 |
| 723 | GUACCUGGAUAAGGUGGAG | 4751 | 723 | GUACCUGGAUAAGGUGGAG | 4751 | 741 | CUCCACCUUAUCCAGGUAC | 4848 |
| 741 | GAGGAACAUCAAGAAAUCC | 4752 | 741 | GAGGAACAUCAAGAAAUCC | 4752 | 759 | GGAUUUCUUGAUGUUCCUC | 4849 |
| 759 | CCUCCAGGAGCACCUGCCC | 4753 | 759 | CCUCCAGGAGCACCUGCCC | 4753 | 777 | GGGCAGGUGCUCCUGGAGG | 4850 |
| 777 | CGACGUGGUGGUAUACAAU | 4754 | 777 | CGACGUGGUGGUAUACAAU | 4754 | 795 | AUUGUAUACCACCACGUCG | 4851 |
| 795 | UGCAGGCACCGACAUCCUC | 4755 | 795 | UGCAGGCACCGACAUCCUC | 4755 | 813 | GAGGAUGUCGGUGCCUGCA | 4852 |
| 813 | CGAGGGGGACCGCCUUGGG | 4756 | 813 | CGAGGGGGACCGCCUUGGG | 4756 | 831 | CCCAAGGCGGUCCCCCUCG | 4853 |
| 831 | GGGGCUGUCCAUCAGCCCA | 4757 | 831 | GGGGCUGUCCAUCAGCCCA | 4757 | 849 | UGGGCUGAUGGACAGCCCC | 4854 |
| 849 | AGCGGGCAUCGUGAAGCGG | 4758 | 849 | AGCGGGCAUCGUGAAGCGG | 4758 | 867 | CCGCUUCACGAUGCCCGCU | 4855 |
| 867 | GGAUGAGCUGGUGUUCCGG | 4759 | 867 | GGAUGAGCUGGUGUUCCGG | 4759 | 885 | CCGGAACACCAGCUCAUCC | 4856 |
| 885 | GAUGGUCCGUGGCCGCCGG | 4760 | 885 | GAUGGUCCGUGGCCGCCGG | 4760 | 903 | CCGGCGGCCACGGACCAUC | 4857 |
| 903 | GGUGCCCAUCCUUAUGGUG | 4761 | 903 | GGUGCCCAUCCUUAUGGUG | 4761 | 921 | CACCAUAAGGAUGGGCACC | 4858 |
| 921 | GACCUCAGGCGGGUACCAG | 4762 | 921 | GACCUCAGGCGGGUACCAG | 4762 | 939 | CUGGUACCCGCCUGAGGUC | 4859 |
| 939 | GAAGCGCACAGCCCGCAUC | 4763 | 939 | GAAGCGCACAGCCCGCAUC | 4763 | 957 | GAUGCGGGCUGUGCGCUUC | 4860 |
| 957 | CAUUGCUGACUCCAUACUU | 4764 | 957 | CAUUGCUGACUCCAUACUU | 4764 | 975 | AAGUAUGGAGUCAGCAAUG | 4861 |
| 975 | UAAUCUGUUUGGCCUGGGG | 4765 | 975 | UAAUCUGUUUGGCCUGGGG | 4765 | 993 | CCCCAGGCCAAACAGAUUA | 4862 |
| 993 | GCUCAUUGGGCCUGAGUCA | 4766 | 993 | GCUCAUUGGGCCUGAGUCA | 4766 | 1011 | UGACUCAGGCCCAAUGAGC | 4863 |
| 1011 | ACCCAGCGUCUCCGCACAG | 4767 | 1011 | ACCCAGCGUCUCCGCACAG | 4767 | 1029 | CUGUGCGGAGACGCUGGGU | 4864 |
| 1029 | GAACUCAGACACACCGCUG | 4768 | 1029 | GAACUCAGACACACCGCUG | 4768 | 1047 | CAGCGGUGUGUCUGAGUUC | 4865 |
| 1047 | GCUUCCCCCUGCAGUGCCC | 4769 | 1047 | GCUUCCCCCUGCAGUGCCC | 4769 | 1065 | GGGCACUGCAGGGGGAAGC | 4866 |
| 1065 | CUGACCCUUGCUGCCCUGC | 4770 | 1065 | CUGACCCUUGCUGCCCUGC | 4770 | 1083 | GCAGGGCAGCAAGGGUCAG | 4867 |
| 1083 | CCUGUCACGUGGCCCUGCC | 4771 | 1083 | CCUGUCACGUGGCCCUGCC | 4771 | 1101 | GGCAGGGCCACGUGACAGG | 4868 |
| 1101 | CUAUCCGCCCCUUAGUGCU | 4772 | 1101 | CUAUCCGCCCCUUAGUGCU | 4772 | 1119 | AGCACUAAGGGGCGGAUAG | 4869 |
| 1119 | UUUUUGUUUUCUAACCUCA | 4773 | 1119 | UUUUUGUUUUCUAACCUCA | 4773 | 1137 | UGAGGUUAGAAAACAAAAA | 4870 |
| 1137 | AUGGGGUGGUGGAGGCAGC | 4774 | 1137 | AUGGGGUGGUGGAGGCAGC | 4774 | 1155 | GCUGCCUCCACCACCCCAU | 4871 |
| 1155 | CCUUCAGUGAGCAUGGAGG | 4775 | 1155 | CCUUCAGUGAGCAUGGAGG | 4775 | 1173 | CCUCCAUGCUCACUGAAGG | 4872 |
| 1173 | GGGCAGGGCCAUCCCUGGC | 4776 | 1173 | GGGCAGGGCCAUCCCUGGC | 4776 | 1191 | GCCAGGGAUGGCCCUGCCC | 4873 |
| 1191 | CUGGGGCCUGGAGCUGGCC | 4777 | 1191 | CUGGGGCCUGGAGCUGGCC | 4777 | 1209 | GGCCAGCUCCAGGCCCCAG | 4874 |
| 1209 | CCUUCCUCUACUUUUCCCU | 4778 | 1209 | CCUUCCUCUACUUUUCCCU | 4778 | 1227 | AGGGAAAAGUAGAGGAAGG | 4875 |
| 1227 | UGCUGGAAGCCAGAAGGGC | 4779 | 1227 | UGCUGGAAGCCAGAAGGGC | 4779 | 1245 | GCCCUUCUGGCUUCCAGCA | 4876 |
| 1245 | CUUGAGGCCUCUAUGGGUG | 4780 | 1245 | CUUGAGGCCUCUAUGGGUG | 4780 | 1263 | CACCCAUAGAGGCCUCAAG | 4877 |
| 1263 | GGGGGCAGAAGGCAGAGCC | 4781 | 1263 | GGGGGCAGAAGGCAGAGCC | 4781 | 1281 | GGCUCUGCCUUCUGCCCCC | 4878 |
| 1281 | CUGUGUCCCAGGGGGACCC | 4782 | 1281 | CUGUGUCCCAGGGGGACCC | 4782 | 1299 | GGGUCCCCCUGGGACACAG | 4879 |
| 1299 | CACACGAAGUCACCAGCCC | 4783 | 1299 | CACACGAAGUCACCAGCCC | 4783 | 1317 | GGGCUGGUGACUUCGUGUG | 4880 |
| 1317 | CAUAGGUCCAGGGAGGCAG | 4784 | 1317 | CAUAGGUCCAGGGAGGCAG | 4784 | 1335 | CUGCCUCCCUGGACCUAUG | 4881 |
| 1335 | GGCAGUUAACUGAGAAUUG | 4785 | 1335 | GGCAGUUAACUGAGAAUUG | 4785 | 1353 | CAAUUCUCAGUUAACUGCC | 4882 |
| 1353 | GGAGAGGACAGGCUAGGUC | 4786 | 1353 | GGAGAGGACAGGCUAGGUC | 4786 | 1371 | GACCUAGCCUGUCCUCUCC | 4883 |
| 1371 | CCCAGGCACAGCGAGGGCC | 4787 | 1371 | CCCAGGCACAGCGAGGGCC | 4787 | 1389 | GGCCCUCGCUGUGCCUGGG | 4884 |
| 1389 | CCUGGGCUUGGGGUGUUCU | 4788 | 1389 | CCUGGGCUUGGGGUGUUCU | 4788 | 1407 | AGAACACCCCAAGCCCAGG | 4885 |
| 1407 | UGGUUUUGAGAACGGCAGA | 4789 | 1407 | UGGUUUUGAGAACGGCAGA | 4789 | 1425 | UCUGCCGUUCUCAAAACCA | 4886 |
| 1425 | ACCCAGGUCGGAGUGAGGA | 4790 | 1425 | ACCCAGGUCGGAGUGAGGA | 4790 | 1443 | UCCUCACUCCGACCUGGGU | 4887 |
| 1443 | AAGCUUCCACCUCCAUCCU | 4791 | 1443 | AAGCUUCCACCUCCAUCCU | 4791 | 1461 | AGGAUGGAGGUGGAAGCUU | 4888 |
| 1461 | UGACUAGGCCUGCAUCCUA | 4792 | 1461 | UGACUAGGCCUGCAUCCUA | 4792 | 1479 | UAGGAUGCAGGCCUAGUCA | 4889 |
| 1479 | AACUGGGCCUCCCUCCCUC | 4793 | 1479 | AACUGGGCCUCCCUCCCUC | 4793 | 1497 | GAGGGAGGGAGGCCCAGUU | 4890 |
| 1497 | CCCCUUGGUCAUGGGAUUU | 4794 | 1497 | CCCCUUGGUCAUGGGAUUU | 4794 | 1515 | AAAUCCCAUGACCAAGGGG | 4891 |
| 1515 | UGCUGCCCUCUUUGCCCCA | 4795 | 1515 | UGCUGCCCUCUUUGCCCCA | 4795 | 1533 | UGGGGCAAAGAGGGCAGCA | 4892 |
| 1533 | AGAGCUGAAGAGCUAUAGG | 4796 | 1533 | AGAGCUGAAGAGCUAUAGG | 4796 | 1551 | CCUAUAGCUCUUCAGCUCU | 4893 |
| 1551 | GCACUGGUGUGGAUGGCCC | 4797 | 1551 | GCACUGGUGUGGAUGGCCC | 4797 | 1569 | GGGCCAUCCACACCAGUGC | 4894 |
| 1569 | CAGGAGGUGCUGGAGCUAG | 4798 | 1569 | CAGGAGGUGGUGGAGGUAG | 4798 | 1587 | CUAGCUCCAGCACCUCCUG | 4895 |
| 1587 | GGUCUCCAGGUGGGCCUGG | 4799 | 1587 | GGUCUCCAGGUGGGCCUGG | 4799 | 1605 | CCAGGCCCACCUGGAGACC | 4896 |
| 1605 | GUUCCCAGGCAGCAGGUGG | 4800 | 1605 | GUUCCCAGGCAGCAGGUGG | 4800 | 1623 | CCACCUGCUGCCUGGGAAC | 4897 |
| 1623 | GGAACCCUGGGCCUGGAUG | 4801 | 1623 | GGAACCCUGGGCCUGGAUG | 4801 | 1641 | CAUCCAGGCCCAGGGUUCC | 4898 |
| 1641 | GUGAGGGGCGGUCAGGAAG | 4802 | 1641 | GUGAGGGGCGGUCAGGAAG | 4802 | 1659 | CUUCCUGACCGCCCCUCAC | 4899 |
| 1659 | GGGGUACAGGUGGGUUCCC | 4803 | 1659 | GGGGUACAGGUGGGUUCCC | 4803 | 1677 | GGGAACCCACCUGUACCCC | 4900 |
| 1677 | CUCAUGUGGAGUUCCCCCU | 4804 | 1677 | CUCAUCUGGAGUUCCCCCU | 4804 | 1695 | AGGGGGAACUCCAGAUGAG | 4901 |
| 1695 | UCAAUAAAGCAAGGUCUGG | 4805 | 1695 | UCAAUAAAGCAAGGUCUGG | 4805 | 1713 | CCAGACCUUGCUUUAUUGA | 4902 |
| 1713 | GACCUGCAAAAAAAAAAAA | 4806 | 1713 | GACCUGCAAAAAAAAAAAA | 4806 | 1731 | UUUUUUUUUUUUGCAGGUC | 4903 |
| 1731 | AAAAAAAAAAAAAAAAAAA | 4807 | 1731 | AAAAAAAAAAAAAAAAAAA | 4807 | 1749 | UUUUUUUUUUUUUUUUUUU | 4904 |

[0541] The 3′-ends of the Upper sequence and the Lower sequence of the siNA construct can include an overhang sequence, for example about 1, 2, 3, or 4 nucleotides in length, preferably 2 nucleotides in length, wherein the overhanging sequence of the lower sequence is optionally complementary to a portion of the target sequence. The upper sequence is also referred to as the sense strand, whereas the lower sequence is also referred to as the antisense strand. The upper and lower sequences in the Table can further comprise a chemical modification having Formulae I-VII, such as exemplary siNA constructs shown in FIGS. 4 and 5, or having modifications described in Table IV or any combination thereof.

TABLE III

HDAC synthetic siNA and Target Sequences

| | | | | | | |
|---|---|---|---|---|---|---|
| Tar- | | | | | | |
| get | | Seq | | | | Seq |
| Pos | Target | ID | Cmpd# | Aliases | Sequence | ID |

HDAC1

| | | | | | |
|---|---|---|---|---|---|
| 744 | CCGCUCCGAGACGGGAUUGAUGA | 231 | HDAC1: 744U21 siNA sense | GCUCCGAGACGGGAUUGAUTT | 239 |
| 1892 | CAGGCUCCUAAAGUAACAUCAGC | 232 | HDAC1: 1892U21 siNA sense | GGCUCCUAAAGUAACAUCATT | 240 |
| 1921 | UAGAUUGGUUCUGUUUUCGUACC | 233 | HDAC1: 1921U21 siNA sense | GAUUGGUUCUGUUUUCGUATT | 241 |
| 743 | CCCGCUCCGAGACGGGAUUGAUG | 234 | HDAC1: 743U21 siNA sense | CGCUCCGAGACGGGAUUGATT | 242 |
| 963 | GGCGGUGGUUACACCAUUCGUAA | 235 | HDAC1: 963U21 siNA sense | CGGUGGUUACACCAUUCGUTT | 243 |
| 1717 | CCCGUUCUUAACUUUGAACCAUA | 236 | HDAC1: 1717U21 siNA sense | CGUUCUUAACUUUGAACCATT | 244 |
| 30 | CGGACCGACUGACGGUAGGGACG | 237 | HDAC1: 30U21 siNA sense | GACCGACUGACGGUAGGGATT | 245 |
| 741 | UACCCGCUCCGAGACGGGAUUGA | 238 | HDAC1: 741U21 siNA sense | CCCGCUCCGAGACGGGAUUTT | 246 |
| 744 | CCGCUCCGAGACGGGAUUGAUGA | 231 | HDAC1: 762L21 siNA antisense | AUCAAUCCCGUCUCGGAGCTT | 247 |
| | | | (744C) | | |
| 1892 | CAGGCUCCUAAAGUAACAUCAGC | 232 | HDAC1: 1910L21 siNA antisense | UGAUGUUACUUUAGGAGCCTT | 248 |
| | | | (1892C) | | |
| 1921 | UAGAUUGGUUCUGUUUUCGUACC | 233 | HDAC1: 1939L21 siNA antisense | UACGAAAACAGAACCAAUCTT | 249 |
| | | | (1921C) | | |
| 743 | CCCGCUCCGAGACGGGAUUGAUG | 234 | HDAC1: 761L21 siNA antisense | UCAAUCCCGUCUCGGAGCGTT | 250 |
| | | | (743C) | | |
| 963 | GGCGGUGGUUACACCAUUCGUAA | 235 | HDAC1: 981L21 siNA antisense | ACGAAUGGUGUAACCACCGTT | 251 |
| | | | (963C) | | |
| 1717 | CCCGUUCUUAACUUUGAACCAUA | 236 | HDAC1: 1735L21 siNA antisense | UGGUUCAAAGUUAAGAACGTT | 252 |
| | | | (1717C) | | |
| 30 | CGGACCGACUGACGGUAGGGACG | 237 | HDAC1: 48L21 siNA antisense | UCCCUACCGUCAGUCGGUCTT | 253 |
| | | | (30C) | | |
| 741 | UACCCGCUCCGAGACGGGAUUGA | 238 | HDAC1: 759L21 siNA antisense | AAUCCCGUCUCGGAGCGGGTT | 254 |
| | | | (741C) | | |
| 744 | CCGCUCCGAGACGGGAUUGAUGA | 231 | HDAC1: 744U21 siNA sense stab04 | B GcuccGAGAcGGGAuuGAuTT B | 255 |
| 1892 | CAGGCUCCUAAAGUAACAUCAGC | 232 | HDAC1: 1892U21 siNA sense | B GGcuccuAAAGuAAcAucATT B | 256 |
| | | | stab04 | | |
| 1921 | UAGAUUGGUUCUGUUUUCGUACC | 233 | HDAC1: 1921U21 siNA sense | B GAuuGGuucuGuuuucGuATT B | 257 |
| | | | stab04 | | |
| 743 | CGCGCUCCGAGACGGGAUUGAUG | 234 | HDAC1: 743U21 siNA sense stab04 | B cGcuccGAGAcGGGAuuGATT B | 258 |
| 963 | GGCGGUGGUUACACCAUUCGUAA | 235 | HDAC1: 963U21 siNA sense stab04 | B cGGuGGuuAcAccAuucGuTT B | 259 |
| 1717 | CCCGUUCUUAACUUUGAACCAUA | 236 | HDAC1: 1717U21 siNA sense | B cGuucuuAAcuuuGAAccATT B | 260 |
| | | | stab04 | | |
| 30 | CGGACCGACUGACGGUAGGGACG | 237 | HDAC1: 30U21 siNA sense stab04 | B GAccGAcuGAcGGuAGGGATT B | 261 |
| 741 | UACCGGCUCCGAGACGGGAUUGA | 238 | HDAC1: 741U21 siNA sense stab04 | B cccGcuccGAGAcGGGAuuTT B | 262 |
| 744 | CCGCUCCGAGACGGGAUUGAUGA | 231 | HDAC1: 762L21 siNA antisense | AucAAucccGucucGGAGcTsT | 263 |
| | | | (744C) stab05 | | |
| 1892 | CAGGCUCCUAAAGUAACAUCAGC | 232 | HDAC1: 1910L21 siNA antisense | uGAuGuuAcuuuAGGAGccTsT | 264 |
| | | | (1892C) stab05 | | |
| 1921 | UAGAUUGGUUCUGUUUUCGUACC | 233 | HDAC1: 1939L21 siNA antisense | uAcGAAAAcAGAAccAAucTsT | 265 |
| | | | (1921C) stab05 | | |
| 743 | CCCGCUCCGAGACGGGAUUGAUG | 234 | HDAC1: 761L21 siNA antisense | ucAAucccGucucGGAGcGTsT | 266 |
| | | | (743C) stab05 | | |
| 963 | GGCGGUGGUUACACCAUUCGUAA | 235 | HDAC1: 981L21 siNA antisense | AcGAAuGGuGuAAccAccGTsT | 267 |
| | | | (963C) stab05 | | |
| 1717 | CCCGUUCUUAACUUUGAACCAUA | 236 | HDAC1: 1735L21 siNA antisense | uGGuucAAAGuuAAGAAcGTsT | 268 |
| | | | (1717C) stab05 | | |
| 30 | CGGACCGACUGACGGUAGGGACG | 237 | HDAC1: 48L21 siNA antisense | ucccuAccGucAGucGGucTsT | 269 |
| | | | (30C) stab05 | | |
| 741 | UACCCGCUCCGAGACGGGAUUGA | 238 | HDAC1: 759L21 siNA antisense | AAucccGucucGGAGcGGGTsT | 270 |
| | | | (741C) stab05 | | |
| 744 | CCGCUCCGAGACGGGAUUGAUGA | 231 | HDAC1: 744U21 siNA sense stab07 | B GcuccGAGAcGGGAuuGAuTT B | 271 |
| 1892 | CAGGCUCCUAAAGUAACAUCAGC | 232 | HDAC1: 1892U21 siNA sense | B GGcuccuAAAGuAAcAucATT B | 272 |
| | | | stab07 | | |
| 1921 | UAGAUUGGUUCUGUUUUCGUACC | 233 | HDAC1: 1921U21 siNA sense | B GAuuGGuucuGuuuucGuATT B | 273 |
| | | | stab07 | | |
| 743 | CCCGCUCCGAGACGGGAUUGAUG | 234 | HDAC1: 743U21 siNA sense stab07 | B cGcuccGAGAcGGGAuuGATT B | 274 |
| 963 | GGCGGUGGUUACACCAUUCGUAA | 235 | HDAC1: 963U21 siNA sense stab07 | B cGGuGGuuAcAccAuucGuTT B | 275 |
| 1717 | CCCGUUCUUAACUUUGAACCAUA | 236 | HDAC1: 1717U21 siNA sense | B cGuucuuAAcuuuGAAccATT B | 276 |
| | | | stab07 | | |
| 30 | CGGACCGACUGACGGUAGGGACG | 237 | HDAC1: 30U21 siNA sense stab07 | B GAccGAcuGAcGGuAGGGATT B | 277 |
| 741 | UACCCGCUCCGAGACGGGAUUGA | 238 | HDAC1: 741U21 siNA sense stab07 | B cccGcuccGAGAcGGGAuuTT B | 278 |
| 744 | CCGCUCCGAGACGGGAUUGAUGA | 231 | HDAC1: 762L21 siNA antisense | AucAAucccGucucGGAGcTsT | 279 |
| | | | (744C) stab11 | | |
| 1892 | CAGGCUCCUAAAGUAACAUCAGC | 232 | HDAC1: 1910L21 siNA antisense | uGAuGuuAcuuuAGGAGccTsT | 280 |
| | | | (1892C) stab11 | | |
| 1921 | UAGAUUGGUUCUGUUUUCGUACC | 233 | HDAC1: 1939L21 siNA antisense | uAcGAAAAcAGAAccAAucTsT | 281 |
| | | | (1921C) stab11 | | |
| 743 | CCCGCUCCGAGACGGGAUUGAUG | 234 | HDAC1: 761L21 siNA antisense | ucAAucccGucucGGAGcGTsT | 282 |
| | | | (743C) stab11 | | |
| 963 | GGCGGUGGUUACACCAUUCGUAA | 235 | HDAC1: 981L21 siNA antisense | AcGAAuGGuGuAAccAccGTsT | 283 |
| | | | (963C) stab11 | | |
| 1717 | CCCGUUCUUAACUUUGAACCAUA | 236 | HDAC1: 1735L21 siNA antisense | uGGuucAAAGuuAAGAAcGTsT | 284 |
| | | | (1717C) stab11 | | |
| 30 | CGGACCGACUGACGGUAGGGACG | 237 | HDAC1: 48L21 siNA antisense | ucccuAccGucAGucGGucTsT | 285 |
| | | | (30C) stab11 | | |
| 741 | UACCCGCUCCGAGACGGGAUUGA | 238 | HDAC1: 759L21 siNA antisense | AAucccGucucGGAGcGGGTsT | 286 |
| | | | (741C) stab11 | | |
| 744 | CCGCUCCGAGACGGGAUUGAUGA | 231 | HDAC1: 744U21 siNA sense stab18 | B GcuccGAGAcGGGAuuGAuTT B | 287 |
| 1892 | CAGGCUCCUAAAGUAACAUCAGC | 232 | HDAC1: 1892U21 siNA sense | B GGcuccuAAAGuAAcAucATT B | 288 |
| | | | stab18 | | |
| 1921 | UAGAUUGGUUCUGUUUUCGUACC | 233 | HDAC1: 1921U21 siNA sense | B GAuuGGuucuGuuuucGuATT B | 289 |
| | | | stab18 | | |
| 743 | CCCGCUCCGAGACGGGAUUGAUG | 234 | HDAC1: 743U21 siNA sense stab18 | B cGcuccGAGAcGGGAuuGATT B | 290 |
| 963 | GGCGGUGGUUACACCAUUCGUAA | 235 | HDAC1: 963U21 siNA sense stab18 | B cGGuGGuuAcAccAuucGuTT B | 291 |
| 1717 | CCCGUUCUUAACUUUGAACCAUA | 236 | HDAC1: 1717U21 siNA sense | B cGuucuuAAcuuuGAAccATT B | 292 |
| | | | stab18 | | |
| 30 | CGGACCGACUGACGGUAGGGACG | 237 | HDAC1: 30U21 siNA sense stab18 | B GAccGAcuGAcGGuAGGGATT B | 293 |
| 741 | UACCCGCUCCGAGACGGGAUUGA | 238 | HDAC1: 741U21 siNA sense stab18 | B cccGcuccGAGAcGGGAuuTT B | 294 |
| 744 | CCGCUCCGAGACGGGAUUGAUGA | 231 | HDAC1: 762L21 siNA antisense | AucAAucccGucucGGAGcTsT | 295 |
| | | | (744C) stab08 | | |
| 1892 | CAGGCUCCUAAAGUAACAUCAGC | 232 | HDAC1: 1910L21 siNA antisense | uGAuGuuAcuuuAGGAGccTsT | 296 |
| | | | (1892C) stab08 | | |
| 1921 | UAGAUUGGUUCUGUUUUCGUACC | 233 | HDAC1: 1939L21 siNA antisense | uAcGAAAAcAGAAccAAucTsT | 297 |
| | | | (1921C) stab08 | | |
| 743 | CCCGCUCCGAGACGGGAUUGAUG | 234 | HDAC1: 761L21 siNA antisense | ucAAucccGucucGGAGcGTsT | 298 |
| | | | (743C) stab08 | | |
| 963 | GGCGGUGGUUACACCAUUCGUAA | 235 | HDAC1: 981L21 siNA antisense | AcGAAuGGuGuAAccAccGTsT | 299 |
| | | | (963C) stab08 | | |
| 1717 | CCCGUUCUUAACUUUGAACCAUA | 236 | HDAC1: 1735L21 siNA antisense | uGGuucAAAGuuAAGAAcGTsT | 300 |
| | | | (1717C) stab08 | | |
| 30 | CGGACCGACUGACGGUAGGGACG | 237 | HDAC1: 48L21 siNA antisense | ucccuAccGucAGucGGucTsT | 301 |
| | | | (30C) stab08 | | |
| 741 | UACCCGCUCCGAGACGGGAUUGA | 238 | HDAC1: 759L21 siNA antisense | AAucccGucucGGAGcGGGTsT | 302 |
| | | | (741C) stab08 | | |
| 744 | CCGCUCCGAGACGGGAUUGAUGA | 231 | HDAC1: 744U21 siNA sense stab09 | B GCUCCGAGACGGGAUUGAUTT B | 303 |
| 1892 | CAGGCUCCUAAAGUAACAUCAGC | 232 | HDAC1: 1892U21 siNA sense | B GGCUCCUAAAGUAACAUCATT B | 304 |
| | | | stab09 | | |
| 1921 | UAGAUUGGUUCUGUUUUCGUACC | 233 | HDAC1: 1921U21 siNA sense | B GAUUGGUUCUGUUUUCGUATT B | 305 |
| | | | stab09 | | |
| 743 | CCCGCUCCGAGACGGGAUUGAUG | 234 | HDAC1: 743U21 siNA sense stab09 | B CGCUCCGAGACGGGAUUGATT B | 306 |
| 963 | GGCGGUGGUUACACCAUUCGUAA | 235 | HDAC1: 963U21 siNA sense stab09 | B CGGUGGUUACACCAUUCGUTT B | 307 |
| 1717 | CCCGUUCUUAACUUUGAACCAUA | 236 | HDAC1: 1717U21 siNA sense | B CGUUCUUAACUUUGAACCATT B | 308 |
| | | | stab09 | | |
| 30 | CGGACCGACUGACGGUAGGGACG | 237 | HDAC1: 30U21 siNA sense stab09 | B GACCGACUGACGGUAGGGATT B | 309 |
| 741 | UACCCGCUCCGAGACGGGAUUGA | 238 | HDAC1: 741U21 siNA sense stab09 | B CCCGCUCCGAGACGGGAUUTT B | 310 |
| 744 | CCGCUCCGAGACGGGAUUGAUGA | 231 | HDAC1: 762L21 siNA antisense | AUCAAUCCCGUCUCGGAGCTsT | 311 |
| | | | (744C) stab10 | | |
| 1892 | CAGGCUCCUAAAGUAACAUCAGC | 232 | HDAC1: 1910L21 siNA antisense | UGAUGUUACUUUAGGAGCCTsT | 312 |
| | | | (1892C) stab10 | | |
| 1921 | UAGAUUGGUUCUGUUUUCGUACC | 233 | HDAC1: 1939L21 siNA antisense | UACGAAAACAGAACCAAUCTsT | 313 |
| | | | (1921C) stab10 | | |
| 743 | CCCGCUCCGAGACGGGAUUGAUG | 234 | HDAC1: 761L21 siNA antisense | UCAAUCCCGUCUCGGAGCGTsT | 314 |
| | | | (743C) stab10 | | |
| 963 | GGCGGUGGUUACACCAUUCGUAA | 235 | HDAC1: 981L21 siNA antisense | ACGAAUGGUGUMCCACCGTsT | 315 |
| | | | (963C) stab10 | | |
| 1717 | CCCGUUCUUAACUUUGAACCAUA | 236 | HDAC1: 1735L21 siNA antisense | UGGUUCAAAGUUAAGAACGTsT | 316 |
| | | | (1717C) stab10 | | |
| 30 | CGGACCGACUGACGGUAGGGACG | 237 | HDAC1: 48L21 siNA antisense | UCCCUACCGUCAGUCGGUCTsT | 317 |
| | | | (30C) stab10 | | |
| 741 | UACCCGCUCCGAGACGGGAUUGA | 238 | HDAC1: 759L21 siNA antisense | AAUCCCGUCUCGGAGCGGGTsT | 318 |
| | | | (741C) stab10 | | |
| 744 | CCGCUCCGAGACGGGAUUGAUGA | 231 | HDAC1: 762L21 siNA antisense | AucAAucccGucucGGAGcTT B | 319 |
| | | | (744C) stab19 | | |
| 1892 | CAGGCUCCUAAAGUAACAUCAGC | 232 | HDAC1: 1910L21 siNA antisense | uGAuGuuAcuuuAGGAGccTT B | 320 |
| | | | (1892C) stab19 | | |
| 1921 | UAGAUUGGUUCUGUUUUCGUACC | 233 | HDAC1: 1939L21 siNA antisense | uAcGAAAAcAGAAccAAucTT B | 321 |
| | | | (1921C) stab19 | | |
| 743 | CCCGCUCCGAGACGGGAUUGAUG | 234 | HDAC1: 761L21 siNA antisense | ucAAucccGucucGGAGcGTT B | 322 |
| | | | (743C) stab19 | | |
| 963 | GGCGGUGGUUACACCAUUCGUAA | 235 | HDAC1: 981L21 siNA antisense | AcGAAuGGuGuAAccAccGTT B | 323 |
| | | | (963C) stab19 | | |
| 1717 | CCCGUUCUUAACUUUGAACCAUA | 236 | HDAC1: 1735L21 siNA antisense | uGGuucAAAGuuAAGAAcGTT B | 324 |
| | | | (1717C) stab19 | | |
| 30 | CGGACCGACUGACGGUAGGGACG | 237 | HDAC1: 48L21 siNA antisense | ucccuAccGucAGucGGucTT B | 325 |
| | | | (30C) stab19 | | |
| 741 | UACCCGCUCCGAGACGGGAUUGA | 238 | HDAC1: 759L21 siNA antisense | AAucccGucucGGAGcGGGTT B | 326 |
| | | | (741C) stab19 | | |
| 744 | CCGCUCCGAGACGGGAUUGAUGA | 231 | HDAC1: 762L21 siNA antisense | AUCAAUCCCGUCUCGGAGCTT B | 327 |
| | | | (744C) stab22 | | |
| 1892 | CAGGCUCCUAAAGUAACAUCAGC | 232 | HDAC1: 1910L21 siNA antisense | UGAUGUUACUUUAGGAGCCTT B | 328 |
| | | | (1892C) stab22 | | |
| 1921 | UAGAUUGGUUCUGUUUUCGUACC | 233 | HDAC1: 1939L21 siNA antisense | UACGAAAACAGAACCAAUCTT B | 329 |
| | | | (1921C) stab22 | | |
| 743 | CCCGCUCCGAGACGGGAUUGAUG | 234 | HDAC1: 761L21 siNA antisense | UCAAUCCCGUCUCGGAGCGTT B | 330 |
| | | | (743C) stab22 | | |
| 963 | GGCGGUGGUUACACCAUUCGUAA | 235 | HDAC1: 981L21 siNA antisense | ACGAAUGGUGUAACCACCGTT B | 331 |
| | | | (963C) stab22 | | |
| 1717 | CCCGUUCUUAACUUUGAACCAUA | 236 | HDAC1: 1735L21 siNA antisense | UGGUUCAAAGUUAAGAACGTT B | 332 |
| | | | (1717C) stab22 | | |
| 30 | CGGACCGACUGACGGUAGGGACG | 237 | HDAC1: 48L21 siNA antisense | UCCCUACCGUCAGUCGGUCTT B | 333 |
| | | | (30C) stab22 | | |
| 741 | UACCCGCUCCGAGACGGGAUUGA | 238 | HDAC1: 759L21 siNA antisense | AAUCCCGUCUCGGAGCGGGTT B | 334 |
| | | | (741C) stab22 | | |
| 744 | CCGCUCCGAGACGGGAUUGAUGA | 231 | HDAC1: 762L21 siNA antisense | AUCAAucccGucucGGAGcTsT | 335 |
| | | | (744C) stab25 | | |
| 1892 | CAGGCUCCUAAAGUAACAUCAGC | 232 | HDAC1: 1910L21 siNA antisense | UGAuGuuAcuuuAGGAGccTsT | 336 |
| | | | (1892C) stab25 | | |
| 1921 | UAGAUUGGUUCUGUUUUCGUACC | 233 | HDAC1: 1939L21 siNA antisense | UACGAAAAcAGAAccAAucTsT | 337 |
| | | | (1921C) stab25 | | |
| 743 | CCCGCUCCGAGACGGGAUUGAUG | 234 | HDAC1: 761L21 siNA antisense | UCAAucccGucucGGAGcGTsT | 338 |
| | | | (743C) stab25 | | |
| 963 | GGCGGUGGUUACACCAUUCGUAA | 235 | HDAC1: 981L21 siNA antisense | ACGAAuGGuGuAAccAccGTsT | 339 |
| | | | (963C) stab25 | | |
| 1717 | CCCGUUCUUAACUUUGAACCAUA | 236 | HDAC1: 1735L21 siNA antisense | UGGuucAAAGuuAAGAAcGTsT | 340 |
| | | | (1717C) stab25 | | |
| 30 | CGGACCGACUGACGGUAGGGACG | 237 | HDAC1: 48L21 siNA antisense | UCCcuAccGucAGucGGucTsT | 341 |
| | | | (30C) stab25 | | |
| 741 | UACCCGCUCCGAGACGGGAUUGA | 238 | HDAC1: 759L21 siNA antisense | AAUcccGucucGGAGcGGGTsT | 342 |
| | | | (741C) stab25 | | |

HDAC2

| | | | | | |
|---|---|---|---|---|---|
| 223 | GAGGCGGCAAAAAAAAAGUCUGC | 563 | HDAC2: 223U21 siNA sense | GGCGGCAAAAAAAAAGUCUTT | 571 |
| 543 | CUCUCAACUGGCGGUUCAGUUGC | 564 | HDAC2: 543U21 siNA sense | CUCAACUGGCGGUUCAGUUTT | 572 |
| 781 | AUCGUGUAAUGACGGUAUCAUUC | 565 | HDAC2: 781U21 siNA sense | CGUGUAAUGACGGUAUCAUTT | 573 |
| 782 | UCGUGUAAUGACGGUAUCAUUCC | 566 | HDAC2: 782U21 siNA sense | GUGUAAUGACGGUAUCAUUTT | 574 |
| 1012 | GUGAUAGACUGGGUUGUUUCAAU | 567 | HDAC2: 1012U21 siNA sense | GAUAGACUGGGUUGUUUCATT | 575 |
| 957 | GAGAUGUAUCAACCUAGUGCUGU | 568 | HDAC2: 957U21 siNA sense | GAUGUAUCAACCUAGUGCUTT | 576 |
| 985 | UACAGUGUGGUGCAGACUCAUUA | 569 | HDAC2: 985U21 siNA sense | CAGUGUGGUGCAGACUCAUTT | 577 |
| 776 | AACAGAUCGUGUAAUGACGGUAU | 570 | HDAC2: 776U21 siNA sense | CAGAUCGUGUAAUGACGGUTT | 578 |
| 223 | GAGGCGGCAAAAAAAAAGUCUGC | 563 | HDAC2: 241L21 siNA antisense | AGACUUUUUUUUUGCCGCCTT | 579 |
| | | | (223C) | | |
| 543 | CUCUCAACUGGCGGUUCAGUUGC | 564 | HDAC2: 561L21 siNA antisense | AACUGAACCGCCAGUUGAGTT | 580 |
| | | | (543C) | | |
| 781 | AUCGUGUAAUGACGGUAUCAUUC | 565 | HDAC2: 799L21 siNA antisense | AUGAUACCGUCAUUACACGTT | 581 |
| | | | (781C) | | |
| 782 | UCGUGUAAUGACGGUAUCAUUCC | 566 | HDAC2: 800L21 siNA antisense | AAUGAUACCGUCAUUACACTT | 582 |
| | | | (782C) | | |
| 1012 | GUGAUAGACUGGGUUGUUUCAAU | 567 | HDAC2: 1030L21 siNA antisense | UGAAACAACCCAGUCUAUCTT | 583 |
| | | | (1012C) | | |
| 957 | GAGAUGUAUCAACCUAGUGCUGU | 568 | HDAC2: 975L21 siNA antisense | AGCACUAGGUUGAUACAUCTT | 584 |
| | | | (957C) | | |
| 985 | UACAGUGUGGUGCAGACUCAUUA | 569 | HDAC2: 1003L21 siNA antisense | AUGAGUCUGCACCACACUGTT | 585 |
| | | | (985C) | | |
| 776 | AACAGAUCGUGUAAUGACGGUAU | 570 | HDAC2: 794L21 siNA antisense | ACCGUCAUUACACGAUCUGTT | 586 |
| | | | (776C) | | |
| 223 | GAGGCGGCAAAAAAAAAGUCUGC | 563 | HDAC2: 223U21 siNA sense stab04 | B GGcGGcAAAAAAAAAGucuTT B | 587 |
| 543 | CUCUCAACUGGCGGUUCAGUUGC | 564 | HDAC2: 543U21 siNA sense stab04 | B cucAAcuGGcGGuucAGuuTT B | 588 |
| 781 | AUCGUGUAAUGACGGUAUCAUUC | 565 | HDAC2: 781U21 siNA sense stab04 | B cGuGuAAuGAcGGuAucAuTT B | 589 |
| 782 | UCGUGUAAUGACGGUAUCAUUCC | 566 | HDAC2: 782U21 siNA sense stab04 | B GuGuAAuGAcGGuAucAuuTT B | 590 |
| 1012 | GUGAUAGACUGGGUUGUUUCAAU | 567 | HDAC2: 1012U21 siNA sense | B GAuAGAcuGGGuuGuuucATT B | 591 |
| | | | stab04 | | |
| 957 | GAGAUGUAUCAACCUAGUGCUGU | 568 | HDAC2: 957U21 siNA sense stab04 | B GAuGuAucAAccuAGuGcuTT B | 592 |
| 985 | UACAGUGUGGUGCAGACUCAUUA | 569 | HDAC2: 985U21 siNA sense stab04 | B cAGuGuGGuGcAGAcucAuTT B | 593 |
| 776 | AACAGAUCGUGUAAUGACGGUAU | 570 | HDAC2: 776U21 siNA sense stab04 | B cAGAucGuGuAAuGAcGGuTT B | 594 |
| 223 | GAGGCGGCAAAAAAAAAGUCUGC | 563 | HDAC2: 241L21 siNA antisense | AGAcuuuuuuuuuGccGccTsT | 595 |
| | | | (223C) stab05 | | |
| 543 | CUCUCAACUGGCGGUUCAGUUGC | 564 | HDAC2: 561L21 siNA antisense | AAcuGAAccGccAGuuGAGTsT | 596 |
| | | | (543C) stab05 | | |
| 781 | AUCGUGUAAUGACGGUAUCAUUC | 565 | HDAC2: 799L21 siNA antisense | AuGAuAccGucAuuAcAcGTsT | 597 |
| | | | (781C) stab05 | | |
| 782 | UCGUGUAAUGACGGUAUCAUUCC | 566 | HDAC2: 800L21 siNA antisense | AAuGAuAccGucAuuAcAcTsT | 598 |
| | | | (782C) stab05 | | |
| 1012 | GUGAUAGACUGGGUUGUUUCAAU | 567 | HDAC2: 1030L21 siNA antisense | uGAAAcAAcccAGucuAucTsT | 599 |
| | | | (1012C) stab05 | | |
| 957 | GAGAUGUAUCAACCUAGUGCUGU | 568 | HDAC2: 975L21 siNA antisense | AGcAcuAGGuuGAuAcAucTsT | 600 |
| | | | (957C) stab05 | | |
| 985 | UACAGUGUGGUGCAGACUCAUUA | 569 | HDAC2: 1003L21 siNA antisense | AuGAGucuGcAccAcAcuGTsT | 601 |
| | | | (985C) stab05 | | |
| 776 | AACAGAUCGUGUAAUGACGGUAU | 570 | HDAC2: 794L21 siNA antisense | AccGucAuuAcAcGAucuGTsT | 602 |
| | | | (776C) stab05 | | |
| 223 | GAGGCGGCAAAAAAAAAGUCUGC | 563 | HDAC2: 223U21 siNA sense stab07 | B GGcGGcAAAAAAAAAGucuTT B | 603 |
| 543 | CUCUCAACUGGCGGUUCAGUUGC | 564 | HDAC2: 543U21 siNA sense stab07 | B cucAAcuGGcGGuucAGuuTT B | 604 |
| 781 | AUCGUGUAAUGACGGUAUCAUUC | 565 | HDAC2: 781U21 siNA sense stab07 | B cGuGuAAuGAcGGuAucAuTT B | 605 |
| 782 | UCGUGUAAUGACGGUAUCAUUCC | 566 | HDAC2: 782U21 siNA sense stab07 | B GuGuAAuGAcGGuAucAuuTT B | 606 |
| 1012 | GUGAUAGACUGGGUUGUUUCAAU | 567 | HDAC2: 1012U21 siNA sense | B GAuAGAcuGGGuuGuuucATT B | 607 |
| | | | stab07 | | |
| 957 | GAGAUGUAUCAACCUAGUGCUGU | 568 | HDAC2: 957U21 siNA sense stab07 | B GAuGuAucAAccuAGuGcuTT B | 608 |
| 985 | UACAGUGUGGUGCAGACUCAUUA | 569 | HDAC2: 985U21 siNA sense stab07 | B cAGuGuGGuGcAGAcucAuTT B | 609 |
| 776 | AACAGAUCGUGUAAUGACGGUAU | 570 | HDAC2: 776U21 siNA sense stab07 | B cAGAucGuGuAAuGAcGGuTT B | 610 |
| 223 | GAGGCGGCAAAAAAAAAGUCUGC | 563 | HDAC2: 241L21 siNA antisense | AGAcuuuuuuuuuGccGccTsT | 611 |
| | | | (223C) stab11 | | |
| 543 | CUCUCAACUGGCGGUUCAGUUGC | 564 | HDAC2: 561L21 siNA antisense | AAcuGAAccGccAGuuGAGTsT | 612 |
| | | | (543C) stab11 | | |
| 781 | AUCGUGUAAUGACGGUAUCAUUC | 565 | HDAC2: 799L21 siNA antisense | AuGAuAccGucAuuAcAcGTsT | 613 |
| | | | (781C) stab11 | | |
| 782 | UCGUGUAAUGACGGUAUCAUUCC | 566 | HDAC2: 800L21 siNA antisense | AAuGAuAccGucAuuAcAcTsT | 614 |
| | | | (782C) stab11 | | |
| 1012 | GUGAUAGACUGGGUUGUUUCAAU | 567 | HDAC2: 1030L21 siNA antisense | uGAAAcAAcccAGucuAucTsT | 615 |
| | | | (1012C) stab11 | | |
| 957 | GAGAUGUAUCAACCUAGUGCUGU | 568 | HDAC2: 975L21 siNA antisense | AGcAcuAGGuuGAuAcAucTsT | 616 |
| | | | (957C) stab11 | | |
| 985 | UACAGUGUGGUGCAGACUCAUUA | 569 | HDAC2: 1003L21 siNA antisense | AuGAGucuGcAccAcAcuGTsT | 617 |
| | | | (985C) stab11 | | |
| 776 | AACAGAUCGUGUAAUGACGGUAU | 570 | HDAC2: 794L21 siNA antisense | AccGucAuuAcAcGAucuGTsT | 618 |
| | | | (776C) stab11 | | |
| 223 | GAGGCGGCAAAAAAAAAGUCUGC | 563 | HDAC2: 223U21 siNA sense stab18 | B GGcGGcAAAAAAAAAGucuTT B | 619 |
| 543 | CUCUCAACUGGCGGUUCAGUUGC | 564 | HDAC2: 543U21 siNA sense stab18 | B cucAAcuGGcGGuucAGuuTT B | 620 |
| 781 | AUCGUGUAAUGACGGUAUCAUUC | 565 | HDAC2: 781U21 siNA sense stab18 | B cGuGuAAuGAcGGuAucAuTT B | 621 |
| 782 | UCGUGUAAUGACGGUAUCAUUCC | 566 | HDAC2: 782U21 siNA sense stab18 | B GuGuAAuGAcGGuAucAuuTT B | 622 |
| 1012 | GUGAUAGACUGGGUUGUUUCAAU | 567 | HDAC2: 1012U21 siNA sense | B GAuAGAcuGGGuuGuuucATT B | 623 |
| | | | stab18 | | |
| 957 | GAGAUGUAUCAACCUAGUGCUGU | 568 | HDAC2: 957U21 siNA sense stab18 | B GAuGuAucAAccuAGuGcuTT B | 624 |
| 985 | UACAGUGUGGUGCAGACUCAUUA | 569 | HDAC2: 985U21 siNA sense stab18 | B cAGuGuGGuGcAGAcucAuTT B | 625 |
| 776 | AACAGAUCGUGUAAUGACGGUAU | 570 | HDAC2: 776U21 siNA sense stab18 | B cAGAucGuGuAAuGAcGGuTT B | 626 |
| 223 | GAGGCGGCAAAAAAAAAGUCUGC | 563 | HDAC2: 241L21 siNA antisense | AGAcuuuuuuuuuGccGccTsT | 627 |
| | | | (223C) stab08 | | |
| 543 | CUCUCAACUGGCGGUUCAGUUGC | 564 | HDAC2: 561L21 siNA antisense | AAcuGAAccGccAGuuGAGTsT | 628 |
| | | | (543C) stab08 | | |
| 781 | AUCGUGUAAUGACGGUAUCAUUC | 565 | HDAC2: 799L21 siNA antisense | AuGAuAccGucAuuAcAcGTsT | 629 |
| | | | (781C) stab08 | | |
| 782 | UCGUGUAAUGACGGUAUCAUUCC | 566 | HDAC2: 800L21 siNA antisense | AAuGAuAccGucAuuAcAcTsT | 630 |
| | | | (782C) stab08 | | |
| 1012 | GUGAUAGACUGGGUUGUUUCAAU | 567 | HDAC2: 1030L21 siNA antisense | uGAAAcAAcccAGucuAucTsT | 631 |
| | | | (1012C) stab08 | | |
| 957 | GAGAUGUAUCAACCUAGUGCUGU | 568 | HDAC2: 975L21 siNA antisense | AGcAcuAGGuuGAuAcAucTsT | 632 |
| | | | (957C) stab08 | | |
| 985 | UACAGUGUGGUGCAGACUCAUUA | 569 | HDAC2: 1003L21 siNA antisense | AuGAGucuGcAccAcAcuGTsT | 633 |
| | | | (985C) stab08 | | |
| 776 | AACAGAUCGUGUAAUGACGGUAU | 570 | HDAC2: 794L21 siNA antisense | AccGucAuuAcAcGAucuGTsT | 634 |
| | | | (776C) stab08 | | |
| 223 | GAGGCGGCAAAAAAAAAGUCUGC | 563 | HDAC2: 223U21 siNA sense stab09 | B GGCGGCAAAAAAAAAGUCUTT B | 635 |
| 543 | CUCUCAACUGGCGGUUCAGUUGC | 564 | HDAC2: 543U21 siNA sense stab09 | B CUCAACUGGCGGUUCAGUUTT B | 636 |
| 781 | AUCGUGUAAUGACGGUAUCAUUC | 565 | HDAC2: 781U21 siNA sense stab09 | B CGUGUAAUGACGGUAUCAUTT B | 637 |
| 782 | UCGUGUAAUGACGGUAUCAUUCC | 566 | HDAC2: 782U21 siNA sense stab09 | B GUGUAAUGACGGUAUCAUUTT B | 638 |
| 1012 | GUGAUAGACUGGGUUGUUUCAAU | 567 | HDAC2: 1012U21 siNA sense | B GAUAGACUGGGUUGUUUCATT B | 639 |
| | | | stab09 | | |
| 957 | GAGAUGUAUCAACCUAGUGCUGU | 568 | HDAC2: 957U21 siNA sense stab09 | B GAUGUAUCAACCUAGUGCUTT B | 640 |
| 985 | UACAGUGUGGUGCAGACUCAUUA | 569 | HDAC2: 985U21 siNA sense stab09 | B CAGUGUGGUGCAGACUCAUTT B | 641 |
| 776 | AACAGAUCGUGUAAUGACGGUAU | 570 | HDAC2: 776U21 siNA sense stab09 | B CAGAUCGUGUAAUGACGGUTT B | 642 |
| 223 | GAGGCGGCAAAAAAAAAGUCUGC | 563 | HDAC2: 241L21 siNA antisense | AGACUUUUUUUUUGCCGCCTsT | 643 |
| | | | (223C) stab10 | | |
| 543 | CUCUCAACUGGCGGUUCAGUUGC | 564 | HDAC2: 561L21 siNA antisense | AACUGAACCGCCAGUUGAGTsT | 644 |
| | | | (543C) stab10 | | |
| 781 | AUCGUGUAAUGACGGUAUCAUUC | 565 | HDAC2: 799L21 siNA antisense | AUGAUACCGUCAUUACACGTsT | 645 |
| | | | (781C) stab10 | | |
| 782 | UCGUGUAAUGACGGUAUCAUUCC | 566 | HDAC2: 800L21 siNA antisense | AAUGAUACCGUCAUUACACTsT | 646 |
| | | | (782C) stab10 | | |
| 1012 | GUGAUAGACUGGGUUGUUUCAAU | 567 | HDAC2: 1030L21 siNA antisense | UGAAACAACCCAGUCUAUCTsT | 647 |
| | | | (1012C) stab10 | | |
| 957 | GAGAUGUAUCAACCUAGUGCUGU | 568 | HDAC2: 975L21 siNA antisense | AGCACUAGGUUGAUACAUCTsT | 648 |
| | | | (957C) stab10 | | |
| 985 | UACAGUGUGGUGCAGACUCAUUA | 569 | HDAC2: 1003L21 siNA antisense | AUGAGUCUGCACCACACUGTsT | 649 |
| | | | (985C) stab10 | | |
| 776 | AACAGAUCGUGUAAUGACGGUAU | 570 | HDAC2: 794L21 siNA antisense | ACCGUCAUUACACGAUCUGTsT | 650 |
| | | | (776C) stab10 | | |
| 223 | GAGGCGGCAAAAAAAAAGUCUGC | 563 | HDAC2: 241L21 siNA antisense | AGAcuuuuuuuuuGccGccTT B | 651 |
| | | | (223C) stab19 | | |
| 543 | CUCUCAACUGGCGGUUCAGUUGC | 564 | HDAC2: 561L21 siNA antisense | AAcuGAAccGccAGuuGAGTT B | 652 |
| | | | (543C) stab19 | | |
| 781 | AUCGUGUAAUGACGGUAUCAUUC | 565 | HDAC2: 799L21 siNA antisense | AuGAuAccGucAuuAcAcGTT B | 653 |
| | | | (781C) stab19 | | |
| 782 | UCGUGUAAUGACGGUAUCAUUCC | 566 | HDAC2: 800L21 siNA antisense | AAuGAuAccGucAuuAcAcTT B | 654 |
| | | | (782C) stab19 | | |
| 1012 | GUGAUAGACUGGGUUGUUUCAAU | 567 | HDAC2: 1030L21 siNA antisense | uGAAAcAAcccAGucuAucTT B | 655 |
| | | | (1012C) stab19 | | |
| 957 | GAGAUGUAUCAACCUAGUGCUGU | 568 | HDAC2: 975L21 siNA antisense | AGcAcuAGGuuGAuAcAucTT B | 656 |
| | | | (957C) stab19 | | |
| 985 | UACAGUGUGGUGCAGACUCAUUA | 569 | HDAC2: 1003L21 siNA antisense | AuGAGucuGcAccAcAcuGTT B | 657 |
| | | | (985C) stab19 | | |
| 776 | AACAGAUCGUGUAAUGACGGUAU | 570 | HDAC2: 794L21 siNA antisense | AccGucAuuAcAcGAucuGTT B | 658 |
| | | | (776C) stab19 | | |
| 223 | GAGGCGGCAAAAAAAAAGUCUGC | 563 | HDAC2: 241L21 siNA antisense | AGACUUUUUUUUUGCCGCCTT B | 659 |
| | | | (223C) stab22 | | |
| 543 | CUCUCAACUGGCGGUUCAGUUGC | 564 | HDAC2: 561L21 siNA antisense | AACUGAACCGCCAGUUGAGTT B | 660 |
| | | | (543C) stab22 | | |
| 781 | AUCGUGUAAUGACGGUAUCAUUC | 565 | HDAC2: 799L21 siNA antisense | AUGAUACCGUCAUUACACGTT B | 661 |
| | | | (781C) stab22 | | |
| 782 | UCGUGUAAUGACGGUAUCAUUCC | 566 | HDAC2: 800L21 siNA antisense | AAUGAUACCGUCAUUACACTT B | 662 |
| | | | (782C) stab22 | | |
| 1012 | GUGAUAGACUGGGUUGUUUCAAU | 567 | HDAC2: 1030L21 siNA antisense | UGAAACAACCCAGUCUAUCTT B | 663 |
| | | | (1012C) stab22 | | |
| 957 | GAGAUGUAUCAACCUAGUGCUGU | 568 | HDAC2: 975L21 siNA antisense | AGCACUAGGUUGAUACAUCTT B | 664 |
| | | | (957C) stab22 | | |
| 985 | UACAGUGUGGUGCAGACUCAUUA | 569 | HDAC2: 1003L21 siNA antisense | AUGAGUCUGCACCACACUGTT B | 665 |
| | | | (985C) stab22 | | |
| 776 | AACAGAUCGUGUAAUGACGGUAU | 570 | HDAC2: 794L21 siNA antisense | ACCGUCAUUACACGAUCUGTT B | 666 |
| | | | (776C) stab22 | | |
| 223 | GAGGCGGCAAAAAAAAAGUCUGC | 563 | HDAC2: 241L21 siNA antisense | AGAcuuuuuuuuuGccGccTsT | 667 |
| | | | (223C) stab25 | | |
| 543 | CUCUCAACUGGCGGUUCAGUUGC | 564 | HDAC2: 561L21 siNA antisense | AACuGAAccGccAGuuGAGTsT | 668 |
| | | | (543C) stab25 | | |
| 781 | AUCGUGUAAUGACGGUAUCAUUC | 565 | HDAC2: 799L21 siNA antisense | AUGAuAccGucAuuAcAcGTsT | 669 |
| | | | (781C) stab25 | | |
| 782 | UCGUGUAAUGACGGUAUCAUUCC | 566 | HDAC2: 800L21 siNA antisense | AAUGAuAccGucAuuAcAcTsT | 670 |
| | | | (782C) stab25 | | |
| 1012 | GUGAUAGACUGGGUUGUUUCAAU | 567 | HDAC2: 1030L21 siNA antisense | UGAAAcAAcccAGucuAucTsT | 671 |
| | | | (1012C) stab25 | | |
| 957 | GAGAUGUAUCAACCUAGUGCUGU | 568 | HDAC2: 975L21 siNA antisense | AGCAcuAGGuuGAuAcAucTsT | 672 |
| | | | (957C) stab25 | | |
| 985 | UACAGUGUGGUGCAGACUCAUUA | 569 | HDAC2: 1003L21 siNA antisense | AUGAGucuGcAccAcAcuGTsT | 673 |
| | | | (985C) stab25 | | |
| 776 | AACAGAUCGUGUAAUGACGGUAU | 570 | HDAC2: 794L21 siNA antisense | ACCGucAuuAcAcGAucuGTsT | 674 |
| | | | (776C) stab25 | | |

HDAC3

| | | | | | |
|---|---|---|---|---|---|
| 361 | GAGUUCUGCUCGCGUUACACAGG | 891 | HDAC3: 361U21 siNA sense | GUUCUGCUCGCGUUACACATT | 899 |
| 849 | UCGAUUGGGCUGCUUUAACCUCA | 892 | HDAC3: 849U21 siNA sense | GAUUGGGCUGCUUUAACCUTT | 900 |
| 768 | GCCGGUUAUCAACCAGGUAGUGG | 893 | HDAC3: 768U21 siNA sense | CGGUUAUCAACCAGGUAGUTT | 901 |
| 781 | CAGGUAGUGGACUUCUACCAACC | 894 | HDAC3: 781U21 siNA sense | GGUAGUGGACUUCUACCAATT | 902 |
| 1484 | UGGUUCUCGAACCAUCUACCUGC | 895 | HDAC3: 1484U21 siNA sense | GUUCUCGAACCAUCUACCUTT | 903 |
| 1538 | UACCUAUUAGGGAUGGAGAUACA | 896 | HDAC3: 1538U21 siNA sense | CCUAUUAGGGAUGGAGAUATT | 904 |
| 315 | UGCCUUCAACGUAGGCGAUGACU | 897 | HDAC3: 315U21 siNA sense | CCUUCAACGUAGGCGAUGATT | 905 |
| 355 | CUCUUUGAGUUCUGCUCGCGUUA | 898 | HDAC3: 355U21 siNA sense | CUUUGAGUUCUGCUCGCGUTT | 906 |
| 361 | GAGUUCUGCUCGCGUUACACAGG | 891 | HDAC3: 379L21 siNA antisense | UGUGUAACGCGAGCAGAACTT | 907 |
| | | | (361C) | | |
| 849 | UCGAUUGGGCUGCUUUAACCUCA | 892 | HDAC3: 867L21 siNA antisense | AGGUUAAAGCAGCCCAAUCTT | 908 |
| | | | (849C) | | |
| 768 | GCCGGUUAUCAACCAGGUAGUGG | 893 | HDAC3: 786L21 siNA antisense | ACUACCUGGUUGAUAACCGTT | 909 |
| | | | (768C) | | |
| 781 | CAGGUAGUGGACUUCUACCAACC | 894 | HDAC3: 799L21 siNA antisense | UUGGUAGAAGUCCACUACCTT | 910 |
| | | | (781C) | | |
| 1484 | UGGUUCUCGAACCAUCUACCUGC | 895 | HDAC3: 1502L21 siNA antisense | AGGUAGAUGGUUCGAGAACTT | 911 |
| | | | (1484C) | | |
| 1538 | UACCUAUUAGGGAUGGAGAUACA | 896 | HDAC3: 1556L21 siNA antisense | UAUCUCCAUCCCUAAUAGGTT | 912 |
| | | | (1538C) | | |
| 315 | UGCCUUCAACGUAGGCGAUGACU | 897 | HDAC3: 333L21 siNA antisense | UCAUCGCCUACGUUGAAGGTT | 913 |
| | | | (315C) | | |
| 355 | CUCUUUGAGUUCUGCUCGCGUUA | 898 | HDAC3: 373L21 siNA antisense | ACGCGAGCAGAACUCAAAGTT | 914 |
| | | | (355C) | | |
| 361 | GAGUUCUGCUCGCGUUACACAGG | 891 | HDAC3: 361U21 siNA sense stab04 | B GuucuGcucGcGuuAcAcATT B | 915 |
| 849 | UCGAUUGGGCUGCUUUAACCUCA | 892 | HDAC3: 849U21 siNA sense stab04 | B GAuuGGGcuGcuuuAAccuTT B | 916 |
| 768 | GCCGGUUAUCAACCAGGUAGUGG | 893 | HDAC3: 768U21 siNA sense stab04 | B cGGuuAucAAccAGGuAGuTT B | 917 |
| 781 | CAGGUAGUGGACUUCUACCAACC | 894 | HDAC3: 781U21 siNA sense stab04 | B GGuAGuGGAcuucuAccAATT B | 918 |
| 1484 | UGGUUCUCGAACCAUCUACCUGC | 895 | HDAC3: 1484U21 siNA sense | B GuucucGAAccAucuAccuTT B | 919 |
| | | | stab04 | | |
| 1538 | UACCUAUUAGGGAUGGAGAUACA | 896 | HDAC3: 1538U21 siNA sense | B ccuAuuAGGGAuGGAGAuATT B | 920 |
| | | | stab04 | | |
| 315 | UGCCUUCAACGUAGGCGAUGACU | 897 | HDAC3: 315U21 siNA sense stab04 | B ccuucAAcGuAGGcGAuGATT B | 921 |
| 355 | CUCUUUGAGUUCUGCUCGCGUUA | 898 | HDAC3: 355U21 siNA sense stab04 | B cuuuGAGuucuGcucGcGuTT B | 922 |
| 361 | GAGUUCUGCUCGCGUUACACAGG | 891 | HDAC3: 379L21 siNA antisense | uGuGuAAcGcGAGcAGAAcTsT | 923 |
| | | | (361C) stab05 | | |
| 849 | UCGAUUGGGCUGCUUUAACCUCA | 892 | HDAC3: 867L21 siNA antisense | AGGuuAAAGcAGcccAAucTsT | 924 |
| | | | (849C) stab05 | | |
| 768 | GCCGGUUAUCAACCAGGUAGUGG | 893 | HDAC3: 786L21 siNA antisense | AcuAccuGGuuGAuAAccGTsT | 925 |
| | | | (768C) stab05 | | |
| 781 | CAGGUAGUGGACUUCUACCAACC | 894 | HDAC3: 799L21 siNA antisense | uuGGuAGAAGuccAcuAccTsT | 926 |
| | | | (781C) stab05 | | |
| 1484 | UGGUUCUCGAACCAUCUACCUGC | 895 | HDAC3: 1502L21 siNA antisense | AGGuAGAuGGuucGAGAAcTsT | 927 |
| | | | (1484C) stab05 | | |
| 1538 | UACCUAUUAGGGAUGGAGAUACA | 896 | HDAC3: 1556L21 siNA antisense | uAucuccAucccuAAuAGGTsT | 928 |
| | | | (1538C) stab05 | | |
| 315 | UGCCUUCAACGUAGGCGAUGACU | 897 | HDAC3: 333L21 siNA antisense | ucAucGccuAcGuuGAAGGTsT | 929 |
| | | | (315C) stab05 | | |
| 355 | CUCUUUGAGUUCUGCUCGCGUUA | 898 | HDAC3: 373L21 siNA antisense | AcGcGAGcAGAAcucAAAGTsT | 930 |
| | | | (355C) stab05 | | |
| 361 | GAGUUCUGCUCGCGUUACACAGG | 891 | HDAC3: 361U21 siNA sense stab07 | B GuucuGcucGcGuuAcAcATT B | 931 |
| 849 | UCGAUUGGGCUGCUUUAACCUCA | 892 | HDAC3: 849U21 siNA sense stab07 | B GAuuGGGcuGcuuuAAccuTT B | 932 |
| 768 | GCCGGUUAUCAACCAGGUAGUGG | 893 | HDAC3: 768U21 siNA sense stab07 | B cGGuuAucAAccAGGuAGuTT B | 933 |
| 781 | CAGGUAGUGGACUUCUACCAACC | 894 | HDAC3: 781U21 siNA sense stab07 | B GGuAGuGGAcuucuAccAATT B | 934 |
| 1484 | UGGUUCUCGAACCAUCUACCUGC | 895 | HDAC3: 1484U21 siNA sense | B GuucucGAAccAucuAccuTT B | 935 |
| | | | stab07 | | |
| 1538 | UACCUAUUAGGGAUGGAGAUACA | 896 | HDAC3: 1538U21 siNA sense | B ccuAuuAGGGAuGGAGAuATT B | 936 |
| | | | stab07 | | |
| 315 | UGCCUUCAACGUAGGGGAUGACU | 897 | HDAC3: 315U21 siNA sense stab07 | B ccuucAAcGuAGGcGAuGATT B | 937 |
| 355 | CUCUUUGAGUUCUGCUCGCGUUA | 898 | HDAC3: 355U21 siNA sense stab07 | B cuuuGAGuucuGcucGcGuTT B | 938 |
| 361 | GAGUUCUGCUCGCGUUACACAGG | 891 | HDAC3: 379L21 siNA antisense | uGuGuAAcGcGAGcAGAAcTsT | 939 |
| | | | (361C) stab11 | | |
| 849 | UCGAUUGGGCUGCUUUAACCUCA | 892 | HDAC3: 867L21 siNA antisense | AGGuuAAAGcAGcccAAucTsT | 940 |
| | | | (849C) stab11 | | |
| 768 | GCCGGUUAUCAACCAGGUAGUGG | 893 | HDAC3: 786L21 siNA antisense | AcuAccuGGuuGAuAAccGTsT | 941 |
| | | | (768C) stab11 | | |
| 781 | CAGGUAGUGGACUUCUACCAACC | 894 | HDAC3:799L21 siNA antisense | uuGGuAGAAGuccAcuAccTsT | 942 |
| | | | (781C) stab11 | | |
| 1484 | UGGUUCUCGAACCAUCUACCUGC | 895 | HDAC3: 1502L21 siNA antisense | AGGuAGAuGGuucGAGAAcTsT | 943 |
| | | | (1484C) stab11 | | |
| 1538 | UACCUAUUAGGGAUGGAGAUACA | 896 | HDAC3: 1556L21 siNA antisense | uAucuccAucccuAAuAGGTsT | 944 |
| | | | (1538C) stab11 | | |
| 315 | UGCCUUCAACGUAGGCGAUGACU | 897 | HDAC3: 333L21 siNA antisense | ucAucGccuAcGuuGAAGGTsT | 945 |
| | | | (315C) stab11 | | |
| 355 | CUCUUUGAGUUCUGCUCGCGUUA | 898 | HDAC3: 373L21 siNA antisense | AcGcGAGcAGAAcucAAAGTsT | 946 |
| | | | (355C) stab11 | | |
| 361 | GAGUUCUGCUCGCGUUACACAGG | 891 | HDAC3: 361U21 siNA sense stab18 | B GuucuGcucGcGuuAcAcATT B | 947 |
| 849 | UCGAUUGGGCUGCUUUAACCUCA | 892 | HDAC3: 849U21 siNA sense stab18 | B GAuuGGGcuGcuuuAAccuTT B | 948 |
| 768 | GCCGGUUAUCAACCAGGUAGUGG | 893 | HDAC3: 768U21 siNA sense stab18 | B cGGuuAucAAccAGGuAGuTT B | 949 |
| 781 | CAGGUAGUGGACUUCUACCAACC | 894 | HDAC3: 781U21 siNA sense stab18 | B GGuAGuGGAcuucuAccAATT B | 950 |
| 1484 | UGGUUCUCGAACCAUCUACCUGC | 895 | HDAC3: 1484U21 siNA sense | B GuucucGAAccAucuAccuTT B | 951 |
| | | | stab18 | | |
| 1538 | UACCUAUUAGGGAUGGAGAUACA | 896 | HDAC3: 1538U21 siNA sense | B ccuAuuAGGGAuGGAGAuATT B | 952 |
| | | | stab18 | | |
| 315 | UGCCUUCAACGUAGGCGAUGACU | 897 | HDAC3: 315U21 siNA sense stab18 | B ccuucAAcGuAGGcGAuGATT B | 953 |
| 355 | CUCUUUGAGUUCUGCUCGCGUUA | 898 | HDAC3: 355U21 siNA sense stab18 | B cuuuGAGuucuGcucGcGuTT B | 954 |
| 361 | GAGUUCUGCUCGCGUUACACAGG | 891 | HDAC3: 379L21 siNA antisense | uGuGuAAcGcGAGcAGAAcTsT | 955 |
| | | | (361C) stab08 | | |
| 849 | UCGAUUGGGCUGCUUUAACCUCA | 892 | HDAC3: 867L21 siNA antisense | AGGuuAAAGcAGcccAAucTsT | 956 |
| | | | (849C) stab08 | | |
| 768 | GCCGGUUAUCAACCAGGUAGUGG | 893 | HDAC3: 786L21 siNA antisense | AcuAccuGGuuGAuAAccGTsT | 957 |
| | | | (768C) stab08 | | |
| 781 | CAGGUAGUGGACUUCUACCAACC | 894 | HDAC3: 799L21 siNA antisense | uuGGuAGAAGuccAcuAccTsT | 958 |
| | | | (781C) stab08 | | |
| 1484 | UGGUUCUCGAACCAUCUACCUGC | 895 | HDAC3: 1502L21 siNA antisense | AGGuAGAuGGuucGAGAAcTsT | 959 |
| | | | (1484C) stab08 | | |
| 1538 | UACCUAUUAGGGAUGGAGAUACA | 896 | HDAC3: 1556L21 siNA antisense | uAucuccAucccuAAuAGGTsT | 960 |
| | | | (1538C) stab08 | | |
| 315 | UGCCUUCAACGUAGGCGAUGACU | 897 | HDAC3: 333L21 siNA antisense | ucAucGccuAcGuuGAAGGTsT | 961 |
| | | | (315C) stab08 | | |
| 355 | CUCUUUGAGUUCUGCUCGCGUUA | 898 | HDAC3: 373L21 siNA antisense | AcGcGAGcAGAAcucAAAGTsT | 962 |
| | | | (355C) stab08 | | |
| 361 | GAGUUCUGCUCGCGUUACACAGG | 891 | HDAC3: 361U21 siNA sense stab09 | B GUUCUGCUCGCGUUACACATT B | 963 |
| 849 | UCGAUUGGGCUGCUUUAACCUCA | 892 | HDAC3: 849U21 siNA sense stab09 | B GAUUGGGCUGCUUUAACCUTT B | 964 |
| 768 | GCCGGUUAUCAACCAGGUAGUGG | 893 | HDAC3: 768U21 siNA sense stab09 | B CGGUUAUCAACCAGGUAGUTT B | 965 |
| 781 | CAGGUAGUGGACUUCUACCAACC | 894 | HDAC3: 781U21 siNA sense stab09 | B GGUAGUGGACUUCUACCAATT B | 966 |
| 1484 | UGGUUCUCGAACCAUCUACCUGC | 895 | HDAC3: 1484U21 siNA sense | B GUUCUCGAACCAUCUACCUTT B | 967 |
| | | | stab09 | | |
| 1538 | UACCUAUUAGGGAUGGAGAUACA | 896 | HDAC3: 1538U21 siNA sense | B CCUAUUAGGGAUGGAGAUATT B | 968 |
| | | | stab09 | | |
| 315 | UGCCUUCAACGUAGGCGAUGACU | 897 | HDAC3: 315U21 siNA sense stab09 | B CCUUCAACGUAGGCGAUGATT B | 969 |
| 355 | CUCUUUGAGUUCUGCUCGCGUUA | 898 | HDAC3: 355U21 siNA sense stab09 | B CUUUGAGUUCUGCUCGCGUTT B | 970 |
| 361 | GAGUUCUGCUCGCGUUACACAGG | 891 | HDAC3: 379L21 siNA antisense | UGUGUAACGCGAGCAGAACTsT | 971 |
| | | | (361C) stab10 | | |
| 849 | UCGAUUGGGCUGCUUUAACCUCA | 892 | HDAC3: 867L21 siNA antisense | AGGUUAAAGCAGCCCAAUCTsT | 972 |
| | | | (849C) stab10 | | |
| 768 | GCCGGUUAUCAACCAGGUAGUGG | 893 | HDAC3: 786L21 siNA antisense | ACUACCUGGUUGAUAACCGTsT | 973 |
| | | | (768C) stab10 | | |
| 781 | CAGGUAGUGGACUUCUACCAACC | 894 | HDAC3: 799L21 siNA antisense | UUGGUAGAAGUCCACUACCTsT | 974 |
| | | | (781C) stab10 | | |
| 1484 | UGGUUCUCGAACCAUCUACCUGC | 895 | HDAC3: 1502L21 siNA antisense | AGGUAGAUGGUUCGAGAACTsT | 975 |
| | | | (1484C) stab10 | | |
| 1538 | UACCUAUUAGGGAUGGAGAUACA | 896 | HDAC3: 1556L21 siNA antisense | UAUCUCCAUCCCUAAUAGGTsT | 976 |
| | | | (1538C) stab10 | | |
| 315 | UGCCUUCAACGUAGGCGAUGACU | 897 | HDAC3: 333L21 siNA antisense | UCAUCGCCUACGUUGAAGGTsT | 977 |
| | | | (315C) stab10 | | |
| 355 | CUCUUUGAGUUCUGCUCGCGUUA | 898 | HDAC3: 373L21 siNA antisense | ACGCGAGCAGAACUCAAAGTsT | 978 |
| | | | (355C) stab10 | | |
| 361 | GAGUUCUGCUCGCGUUACACAGG | 891 | HDAC3: 379L21 siNA antisense | uGuGuAAcGcGAGcAGAAcTT B | 979 |
| | | | (361C) stab19 | | |
| 849 | UCGAUUGGGCUGCUUUAACCUCA | 892 | HDAC3:867L21 siNA antisense | AGGuuAAAGcAGcccAAucTT B | 980 |
| | | | (849C) stab19 | | |
| 768 | GCCGGUUAUCAACCAGGUAGUGG | 893 | HDAC3: 786L21 siNA antisense | AcuAccuGGuuGAuAAccGTT B | 981 |
| | | | (768C) stab19 | | |
| 781 | CAGGUAGUGGACUUCUACCAACC | 894 | HDAC3: 799L21 siNA antisense | uuGGuAGAAGuccAcuAccTT B | 982 |
| | | | (781C) stab19 | | |
| 1484 | UGGUUCUCGAACCAUCUACCUGC | 895 | HDAC3: 1502L21 siNA antisense | AGGuAGAuGGuucGAGAAcTT B | 983 |
| | | | (1484C) stab19 | | |
| 1538 | UACCUAUUAGGGAUGGAGAUACA | 896 | HDAC3: 1556L21 siNA antisense | uAucuccAucccuAAuAGGTT B | 984 |
| | | | (1538C) stab19 | | |
| 315 | UGCCUUCAACGUAGGCGAUGACU | 897 | HDAC3: 333L21 siNA antisense | ucAucGccuAcGuuGAAGGTT B | 985 |
| | | | (315C) stab19 | | |
| 355 | CUCUUUGAGUUCUGCUCGCGUUA | 898 | HDAC3: 373L21 siNA antisense | AcGcGAGcAGAAcucAAAGTT B | 986 |
| | | | (355C) stab19 | | |
| 361 | GAGUUCUGCUCGCGUUACACAGG | 891 | HDAC3: 379L21 siNA antisense | UGUGUAACGCGAGCAGAACTT B | 987 |
| | | | (361C) stab22 | | |
| 849 | UCGAUUGGGCUGCUUUAACCUCA | 892 | HDAC3: 867L21 siNA antisense | AGGUUAAAGCAGCCCAAUCTT B | 988 |
| | | | (849C) stab22 | | |
| 768 | GCCGGUUAUCAACCAGGUAGUGG | 893 | HDAC3: 786L21 siNA antisense | ACUACCUGGUUGAUAACCGTT B | 989 |
| | | | (768C) stab22 | | |
| 781 | CAGGUAGUGGACUUCUACCAACC | 894 | HDAC3: 799L21 siNA antisense | UUGGUAGAAGUCCACUACCTT B | 990 |
| | | | (781C) stab22 | | |
| 1484 | UGGUUCUCGAACCAUCUACCUGC | 895 | HDAC3: 1502L21 siNA antisense | AGGUAGAUGGUUCGAGAACTT B | 991 |
| | | | (1484C) stab22 | | |
| 1538 | UACCUAUUAGGGAUGGAGAUACA | 896 | HDAC3: 1556L21 siNA antisense | UAUCUCCAUCCCUAAUAGGTT B | 992 |
| | | | (1538C) stab22 | | |
| 315 | UGCCUUCAACGUAGGCGAUGACU | 897 | HDAC3: 333L21 siNA antisense | UCAUCGCCUACGUUGAAGGTT B | 993 |
| | | | (315C) stab22 | | |
| 355 | CUCUUUGAGUUCUGCUCGCGUUA | 898 | HDAC3: 373L21 siNA antisense | ACGCGAGCAGAACUCAAAGTT B | 994 |
| | | | (355C) stab22 | | |
| 361 | GAGUUCUGCUCGCGUUACACAGG | 891 | HDAC3: 379L21 siNA antisense | UGUGuAAcGcGAGcAGAAcTsT | 995 |
| | | | (361C) stab25 | | |
| 849 | UCGAUUGGGCUGCUUUAACCUCA | 892 | HDAC3: 867L21 siNA antisense | AGGuuAAAGcAGcccAAucTsT | 996 |
| | | | (849C) stab25 | | |
| 768 | GCCGGUUAUCAACCAGGUAGUGG | 893 | HDAC3: 786L21 siNA antisense | ACUAccuGGuuGAuAAccGTsT | 997 |
| | | | (768C) stab25 | | |
| 781 | CAGGUAGUGGACUUCUACCAACC | 894 | HDAC3: 799L21 siNA antisense | UUGGuAGAAGuccAcuAccTsT | 998 |
| | | | (781C) stab25 | | |
| 1484 | UGGUUCUCGAACCAUCUACCUGC | 895 | HDAC3: 1502L21 siNA antisense | AGGuAGAuGGuucGAGAAcTsT | 999 |
| | | | (1484C) stab25 | | |
| 1538 | UACCUAUUAGGGAUGGAGAUACA | 896 | HDAC3: 1556L21 siNA antisense | UAUcuccAucccuAAuAGGTsT | 1000 |
| | | | (1538C) stab25 | | |
| 315 | UGCCUUCAACGUAGGCGAUGACU | 897 | HDAC3: 333L21 siNA antisense | UCAucGccuAcGuuGAAGGTsT | 1001 |
| | | | (315C) stab25 | | |
| 355 | CUCUUUGAGUUCUGCUCGCGUUA | 898 | HDAC3: 373L21 siNA antisense | ACGcGAGcAGAAcucAAAGTsT | 1002 |
| | | | (355C) stab25 | | |

HDAC4

| | | | | | |
|---|---|---|---|---|---|
| 5108 | GUGUUACGAUCGGAAUGCUUUUU | 1941 | HDAC4: 5108U21 siNA sense | GUUACGAUCGGAAUGCUUUTT | 1949 |
| 4373 | GCGGCCGAGCUGCCGAAUUCAGU | 1942 | HDAC4: 4373U21 siNA sense | GGCCGAGCUGCCGAAUUCATT | 1950 |
| 8280 | UAGGUGAUGUAUGGCUAAGAUUU | 1943 | HDAC4: 8280U21 siNA sense | GGUGAUGUAUGGCUAAGAUTT | 1951 |
| 719 | GAGCUCGUUGGAGCUAUCGUUUC | 1944 | HDAC4: 719U21 siNA sense | GCUCGUUGGAGCUAUCGUUTT | 1952 |
| 5829 | AGGAGGGACCGUAGGUCUUUUCG | 1945 | HDAC4: 5829U21 siNA sense | GAGGGACCGUAGGUCUUUUTT | 1953 |
| 720 | AGCUCGUUGGAGCUAUCGUUUCC | 1946 | HDAC4: 720U21 siNA sense | CUCGUUGGAGCUAUCGUUUTT | 1954 |
| 7892 | AAGUUUGCGUCUUAUUGAACUUA | 1947 | HDAC4: 7892U21 siNA sense | GUUUGCGUCUUAUUGAACUTT | 1955 |
| 8196 | GUGACGGUUUAUUCUGAUUGAGA | 1948 | HDAC4: 8196U21 siNA sense | GACGGUUUAUUCUGAUUGATT | 1956 |
| 5108 | GUGUUACGAUCGGAAUGCUUUUU | 1941 | HDAC4: 5126L21 siNA antisense | AAAGCAUUGCGAUCGUAACTT | 1957 |
| | | | (5108C) | | |
| 4373 | GCGGCCGAGCUGCCGAAUUCAGU | 1942 | HDAC4: 4391L21 siNA antisense | UGAAUUCGGCAGCUCGGCCTT | 1958 |
| | | | (4373C) | | |
| 8280 | UAGGUGAUGUAUGGCUAAGAUUU | 1943 | HDAC4: 8298L21 siNA antisense | AUCUUAGCCAUACAUCACCTT | 1959 |
| | | | (8280C) | | |
| 719 | GAGCUCGUUGGAGCUAUCGUUUC | 1944 | HDAC4: 737L21 siNA antisense | AACGAUAGCUCCAACGAGCTT | 1960 |
| | | | (719C) | | |
| 5829 | AGGAGGGACCGUAGGUCUUUUCG | 1945 | HDAC4: 5847L21 siNA antisense | AAAAGACCUACGGUCCCUCTT | 1961 |
| | | | (5829C) | | |
| 720 | AGCUCGUUGGAGCUAUCGUUUCC | 1946 | HDAC4: 738L21 siNA antisense | AAACGAUAGCUCCAACGAGTT | 1962 |
| | | | (720C) | | |
| 7892 | AAGUUUGCGUCUUAUUGAACUUA | 1947 | HDAC4: 7910L21 siNA antisense | AGUUCAAUAAGACGCAAACTT | 1963 |
| | | | (7892C) | | |
| 8196 | GUGACGGUUUAUUCUGAUUGAGA | 1948 | HDAC4: 8214L21 siNA antisense | UCAAUCAGAAUAAACCGUCTT | 1964 |
| | | | (8196C) | | |
| 5108 | GUGUUACGAUCGGAAUGCUUUUU | 1941 | HDAC4: 5108U21 siNA sense | B GuuAcGAucGGAAuGcuuuTT B | 1965 |
| | | | stab04 | | |
| 4373 | GCGGCCGAGCUGCCGAAUUCAGU | 1942 | HDAC4: 4373U21 siNA sense | B GGccGAGcuGccGAAuucATT B | 1966 |
| | | | stab04 | | |
| 8280 | UAGGUGAUGUAUGGCUAAGAUUU | 1943 | HDAC4: 8280U21 siNA sense | B GGuGAuGuAuGGcuAAGAuTT B | 1967 |
| | | | stab04 | | |
| 719 | GAGCUCGUUGGAGCUAUCGUUUC | 1944 | HDAC4: 719U21 siNA sense stab04 | B GcucGuuGGAGcuAucGuuTT B | 1968 |
| 5829 | AGGAGGGACGGUAGGUCUUUUCG | 1945 | HDAC4: 5829U21 siNA sense | B GAGGGAccGuAGGucuuuuTT B | 1969 |
| | | | stab04 | | |
| 720 | AGCUCGUUGGAGCUAUCGUUUCC | 1946 | HDAC4: 720U21 siNA sense stab04 | B cucGuuGGAGcuAucGuuuTT B | 1970 |
| 7892 | AAGUUUGCGUCUUAUUGAACUUA | 1947 | HDAC4: 7892U21 siNA sense | B GuuuGcGucuuAuuGAAcuTT B | 1971 |
| | | | stab04 | | |
| 8196 | GUGACGGUUUAUUCUGAUUGAGA | 1948 | HDAC4: 8196U21 siNA sense | B GAcGGuuuAuucuGAuuGATT B | 1972 |
| | | | stab04 | | |
| 5108 | GUGUUACGAUCGGAAUGCUUUUU | 1941 | HDAC4: 5126L21 siNA antisense | AAAGcAuuccGAucGuAAcTsT | 1973 |
| | | | (5108C) stab05 | | |
| 4373 | GCGGCCGAGCUGCCGAAUUCAGU | 1942 | HDAC4: 4391L21 siNA antisense | uGAAuucGGcAGcucGGccTsT | 1974 |
| | | | (4373C) stab05 | | |
| 8280 | UAGGUGAUGUAUGGCUAAGAUUU | 1943 | HDAC4: 8298L21 siNA antisense | AucuuAGccAuAcAucAccTsT | 1975 |
| | | | (8280C) stab05 | | |
| 719 | GAGCUCGUUGGAGCUAUCGUUUC | 1944 | HDAC4: 737L21 siNA antisense | AAcGAuAGcuccAAcGAGcTsT | 1976 |
| | | | (719C) stab05 | | |
| 5829 | AGGAGGGACCGUAGGUCUUUUCG | 1945 | HDAC4: 5847L21 siNA antisense | AAAAGAccuAcGGucccucTsT | 1977 |
| | | | (5829C) stab05 | | |
| 720 | AGCUCGUUGGAGCUAUCGUUUCC | 1946 | HDAC4: 738L21 siNA antisense | | |
| | | | (720C) stab05 | AAAcGAuAGcuccAAcGAGTsT | 1978 |
| 7892 | AAGUUUGCGUCUUAUUGAACUUA | 1947 | HDAC4: 7910L21 siNA antisense | AGuucAAuAAGAcGcAAAcTsT | 1979 |
| | | | (7892C) stab05 | | |
| 8196 | GUGACGGUUUAUUCUGAUUGAGA | 1948 | HDAC4: 8214L21 siNA antisense | ucAAucAGAAuAAAccGucTsT | 1980 |
| | | | (8196C) stab05 | | |
| 5108 | GUGUUACGAUCGGAAUGCUUUUU | 1941 | HDAC4: 5108U21 siNA sense | B GuuAcGAucGGAAuGcuuuTT B | 1981 |
| | | | stab07 | | |
| 4373 | GCGGCCGAGCUGCCGAAUUCAGU | 1942 | HDAC4: 4373U21 siNA sense | B GGccGAGcuGccGAAuucATT B | 1982 |
| | | | stab07 | | |
| 8280 | UAGGUGAUGUAUGGCUAAGAUUU | 1943 | HDAC4: 8280U21 siNA sense | B GGuGAuGuAuGGcuAAGAuTT B | 1983 |
| | | | stab07 | | |
| 719 | GAGCUCGUUGGAGCUAUCGUUUC | 1944 | HDAC4: 719U21 siNA sense stab07 | B GcucGuuGGAGcuAucGuuTT B | 1984 |
| 5829 | AGGAGGGACCGUAGGUCUUUUCG | 1945 | HDAC4: 5829U21 siNA sense | B GAGGGAccGuAGGucuuuuTT B | 1985 |
| | | | stab07 | | |
| 720 | AGCUCGUUGGAGCUAUCGUUUCC | 1946 | HDAC4: 720U21 siNA sense stab07 | B cucGuuGGAGcuAucGuuuTT B | 1986 |
| 7892 | AAGUUUGCGUCUUAUUGAACUUA | 1947 | HDAC4: 7892U21 siNA sense | B GuuuGcGucuuAuuGAAcuTT B | 1987 |
| | | | stab07 | | |
| 8196 | GUGACGGUUUAUUCUGAUUGAGA | 1948 | HDAC4: 8196U21 siNA sense | B GAcGGuuuAuucuGAuuGATT B | 1988 |
| | | | stab07 | | |
| 5108 | GUGUUACGAUCGGAAUGCUUUUU | 1941 | HDAC4: 5126L21 siNA antisense | AAAGcAuuccGAucGuAAcTsT | 1989 |
| | | | (5108C) stab11 | | |
| 4373 | GCGGCCGAGCUGCCGAAUUCAGU | 1942 | HDAC4: 4391L21 siNA antisense | uGAAuucGGcAGcucGGccTsT | 1990 |
| | | | (4373C) stab11 | | |
| 8280 | UAGGUGAUGUAUGGCUAAGAUUU | 1943 | HDAC4: 8298L21 siNA antisense | AucuuAGccAuAcAucAccTsT | 1991 |
| | | | (8280C) stab11 | | |
| 719 | GAGCUCGUUGGAGCUAUCGUUUC | 1944 | HDAC4: 737L21 siNA antisense | AAcGAuAGcuccAAcGAGcTsT | 1992 |
| | | | (719C) stab11 | | |
| 5829 | AGGAGGGACCGUAGGUCUUUUCG | 1945 | HDAC4: 5847L21 siNA antisense | AAAAGAccuAcGGucccucTsT | 1993 |
| | | | (5829C) stab11 | | |
| 720 | AGCUCGUUGGAGCUAUCGUUUCC | 1946 | HDAC4: 738L21 siNA antisense | AAAcGAuAGcuccAAcGAGTsT | 1994 |
| | | | (720C) stab11 | | |
| 7892 | AAGUUUGCGUCUUAUUGAACUUA | 1947 | HDAC4: 7910L21 siNA antisense | AGuucAAuAAGAcGcAAAcTsT | 1995 |
| | | | (7892C) stab11 | | |
| 8196 | GUGACGGUUUAUUCUGAUUGAGA | 1948 | HDAC4: 8214L21 siNA antisense | ucAAucAGAAuAAAccGucTsT | 1996 |
| | | | (8196C) stab11 | | |
| 5108 | GUGUUACGAUCGGAAUGCUUUUU | 1941 | HDAC4: 5108U21 siNA sense | B GuuAcGAucGGAAuGcuuuTT B | 1997 |
| | | | stab18 | | |
| 4373 | GCGGCCGAGCUGCCGAAUUCAGU | 1942 | HDAC4: 4373U21 siNA sense | B GGccGAGcuGccGAAuucATT B | 1998 |
| | | | stab18 | | |
| 8280 | UAGGUGAUGUAUGGCUAAGAUUU | 1943 | HDAC4: 8280U21 siNA sense | B GGuGAuGuAuGGcuAAGAuTT B | 1999 |
| | | | stab18 | | |
| 719 | GAGCUCGUUGGAGCUAUCGUUUC | 1944 | HDAC4: 719U21 siNA sense stab18 | B GcucGuuGGAGcuAucGuuTT B | 2000 |
| 5829 | AGGAGGGACCGUAGGUCUUUUCG | 1945 | HDAC4: 5829U21 siNA sense | B GAGGGAccGuAGGucuuuuTT B | 2001 |
| | | | stab18 | | |
| 720 | AGCUCGUUGGAGCUAUCGUUUCC | 1946 | HDAC4: 720U21 siNA sense stab18 | B cucGuuGGAGcuAucGuuuTT B | 2002 |
| 7892 | AAGUUUGCGUCUUAUUGAACUUA | 1947 | HDAC4: 7892U21 siNA sense | B GuuuGcGucuuAuuGAAcuTT B | 2003 |
| | | | stab18 | | |
| 8196 | GUGACGGUUUAUUCUGAUUGAGA | 1948 | HDAC4: 8196U21 siNA sense | B GAcGGuuuAuucuGAuuGATT B | 2004 |
| | | | stab18 | | |
| 5108 | GUGUUACGAUCGGAAUGCUUUUU | 1941 | HDAC4: 5126L21 siNA antisense | AAAGcAuuccGAucGuAAcTsT | 2005 |
| | | | (5108C) stab08 | | |
| 4373 | GCGGCCGAGCUGCCGAAUUCAGU | 1942 | HDAC4: 4391L21 siNA antisense | uGAAuucGGcAGcucGGccTsT | 2006 |
| | | | (4373C) stab08 | | |
| 8280 | UAGGUGAUGUAUGGCUAAGAUUU | 1943 | HDAC4: 8298L21 siNA antisense | AucuuAGccAuAcAucAccTsT | 2007 |
| | | | (8280C) stab08 | | |
| 719 | GAGCUCGUUGGAGCUAUCGUUUC | 1944 | HDAC4: 737L21 siNA antisense | AAcGAuAGcuccAAcGAGcTsT | 2008 |
| | | | (719C) stab08 | | |
| 5829 | AGGAGGGACCGUAGGUCUUUUCG | 1945 | HDAC4: 5847L21 siNA antisense | AAAAGAccuAcGGucccucTsT | 2009 |
| | | | (5829C) stab08 | | |
| 720 | AGCUCGUUGGAGCUAUCGUUUCC | 1946 | HDAC4: 738L21 siNA antisense | AAAcGAuAGcuccAAcGAGTsT | 2010 |
| | | | (720C) stab08 | | |
| 7892 | AAGUUUGCGUCUUAUUGAACUUA | 1947 | HDAC4: 7910L21 siNA antisense | AGuucAAuAAGAcGcAAAcTsT | 2011 |
| | | | (7892C) stab08 | | |
| 8196 | GUGACGGUUUAUUCUGAUUGAGA | 1948 | HDAC4: 8214L21 siNA antisense | ucAAucAGAAuAAAccGucTsT | 2012 |
| | | | (8196C) stab08 | | |
| 5108 | GUGUUACGAUCGGAAUGCUUUUU | 1941 | HDAC4: 5108U21 siNA sense | B GUUACGAUCGGAAUGCUUUTT B | 2013 |
| | | | stab09 | | |
| 4373 | GCGGCCGAGCUGCCGAAUUCAGU | 1942 | HDAC4: 4373U21 siNA sense | B GGCCGAGCUGCCGAAUUCATT B | 2014 |
| | | | stab09 | | |
| 8280 | UAGGUGAUGUAUGGCUAAGAUUU | 1943 | HDAC4: 8280U21 siNA sense | B GGUGAUGUAUGGCUAAGAUTT B | 2015 |
| | | | stab09 | | |
| 719 | GAGCUCGUUGGAGCUAUCGUUUC | 1944 | HDAC4: 719U21 siNA sense stab09 | B GCUCGUUGGAGCUAUCGUUTT B | 2016 |
| 5829 | AGGAGGGACCGUAGGUCUUUUCG | 1945 | HDAC4: 5829U21 siNA sense | B GAGGGACCGUAGGUCUUUUTT B | 2017 |
| | | | stab09 | | |
| 720 | AGCUCGUUGGAGCUAUCGUUUCC | 1946 | HDAC4: 720U21 siNA sense stab09 | B CUCGUUGGAGCUAUCGUUUTT B | 2018 |
| 7892 | AAGUUUGCGUCUUAUUGAACUUA | 1947 | HDAC4: 7892U21 siNA sense | B GUUUGCGUCUUAUUGAACUTT B | 2019 |
| | | | stab09 | | |
| 8196 | GUGACGGUUUAUUCUGAUUGAGA | 1948 | HDAC4: 8196U21 siNA sense | B GACGGUUUAUUCUGAUUGATT B | 2020 |
| | | | stab09 | | |
| 5108 | GUGUUACGAUCGGAAUGCUUUUU | 1941 | HDAC4: 5126L21 siNA antisense | AAAGCAUUCCGAUCGUAACTsT | 2021 |
| | | | (5108C) stab10 | | |
| 4373 | GCGGCCGAGCUGCCGAAUUCAGU | 1942 | HDAC4: 4391L21 siNA antisense | UGAAUUCGGCAGCUCGGCCTsT | 2022 |
| | | | (4373C) stab10 | | |
| 8280 | UAGGUGAUGUAUGGCUAAGAUUU | 1943 | HDAC4: 8298L21 siNA antisense | AUCUUAGCCAUACAUCACCTsT | 2023 |
| | | | (8280C) stab10 | | |
| 719 | GAGCUCGUUGGAG0UAUCGUUUC | 1944 | HDAC4: 737L21 siNA antisense | AACGAUAGCUCCAACGAGCTsT | 2024 |
| | | | (719C) stab10 | | |
| 5829 | AGGAGGGACCGUAGGUCUUUUCG | 1945 | HDAC4: 5847L21 siNA antisense | AAAAGACCUACGGUCCCUCTsT | 2025 |
| | | | (5829C) stab10 | | |
| 720 | AGCUCGUUGGAGCUAUCGUUUCC | 1946 | HDAC4: 738L21 siNA antisense | AAACGAUAGCUCCAACGAGTsT | 2026 |
| | | | (720C) stab10 | | |
| 7892 | AAGUUUGCGUCUUAUUGAACUUA | 1947 | HDAC4: 7910L21 siNA antisense | AGUUCAAUAAGACGCAAACTsT | 2027 |
| | | | (7892C) stab10 | | |
| 8196 | GUGACGGUUUAUUCUGAUUGAGA | 1948 | HDAC4: 8214L21 siNA antisense | UCAAUCAGAAUAAACCGUCTsT | 2028 |
| | | | (8196C) stab10 | | |
| 5108 | GUGUUACGAUCGGAAUGCUUUUU | 1941 | HDAC4: 5126L21 siNA antisense | AAAGcAuuccGAucGuAAcTT B | 2029 |
| | | | (5108C) stab19 | | |
| 4373 | GCGGCCGAGCUGCCGAAUUCAGU | 1942 | HDAC4: 4391L21 siNA antisense | uGAAuucGGcAGcucGGccTT B | 2030 |
| | | | (4373C) stab19 | | |
| 8280 | UAGGUGAUGUAUGGCUAAGAUUU | 1943 | HDAC4: 8298L21 siNA antisense | AucuuAGccAuAcAucAccTT B | 2031 |
| | | | (8280C) stab19 | | |
| 719 | GAGCUCGUUGGAGCUAUCGUUUC | 1944 | HDAC4: 737L21 siNA antisense | AAcGAuAGcuccAAcGAGcTT B | 2032 |
| | | | (719C) stab19 | | |
| 5829 | AGGAGGGACCGUAGGUCUUUUCG | 1945 | HDAC4: 5847L21 siNA antisense | AAAAGAccuAcGGucccucTT B | 2033 |
| | | | (5829C) stab19 | | |
| 720 | AGCUCGUUGGAGCUAUCGUUUCC | 1946 | HDAC4: 738L21 siNA antisense | AAAcGAuAGcuccAAcGAGTT B | 2034 |
| | | | (720C) stab19 | | |
| 7892 | AAGUUUGCGUCUUAUUGAACUUA | 1947 | HDAC4: 7910L21 siNA antisense | AGuucAAuAAGAcGcAAAcTT B | 2035 |
| | | | (7892C) stab19 | | |
| 8196 | GUGACGGUUUAUUCUGAUUGAGA | 1948 | HDAC4: 8214L21 siNA antisense | ucAAucAGAAuAAAccGucTT B | 2036 |
| | | | (8196C) stab19 | | |
| 5108 | GUGUUACGAUCGGAAUGCUUUUU | 1941 | HDAC4: 5126L21 siNA antisense | AAAGCAUUCCGAUCGUAACTT B | 2037 |
| | | | (5108C) stab22 | | |
| 4373 | GCGGCCGAGCUGCCGAAUUCAGU | 1942 | HDAC4: 4391L21 siNA antisense | UGAAUUCGGCAGCUCGGCCTT B | 2038 |
| | | | (4373C) stab22 | | |
| 8280 | UAGGUGAUGUAUGGCUAAGAUUU | 1943 | HDAC4: 8298L21 siNA antisense | AUCUUAGCCAUACAUCACCTT B | 2039 |
| | | | (8280C) stab22 | | |
| 719 | GAGCUCGUUGGAGCUAUCGUUUC | 1944 | HDAC4: 737L21 siNA antisense | AACGAUAGCUCCAACGAGCTT B | 2040 |
| | | | (719C) stab22 | | |
| 5829 | AGGAGGGACCGUAGGUCUUUUCG | 1945 | HDAC4: 5847L21 siNA antisense | AAAAGACCUACGGUCCCUCTT B | 2041 |
| | | | (5829C) stab22 | | |
| 720 | AGCUCGUUGGAGCUAUCGUUUCC | 1946 | HDAC4: 738L21 siNA antisense | AAACGAUAGCUCCAACGAGTT B | 2042 |
| | | | (720C) stab22 | | |
| 7892 | AAGUUUGCGUCUUAUUGAACUUA | 1947 | HDAC4: 7910L21 siNA antisense | AGUUCAAUAAGACGCAAACTT B | 2043 |
| | | | (7892C) stab22 | | |
| 8196 | GUGACGGUUUAUUCUGAUUGAGA | 1948 | HDAC4: 8214L21 siNA antisense | UCAAUCAGAAUAAACCGUCTT B | 2044 |
| | | | (8196C) stab22 | | |
| 5108 | GUGUUACGAUCGGAAUGCUUUUU | 1941 | HDAC4: 5126L21 siNA antisense | AAAGcAuuccGAucGuAAcTsT | 2045 |
| | | | (5108C) stab25 | | |
| 4373 | GCGGCCGAGCUGCCGAAUUCAGU | 1942 | HDAC4: 4391L21 siNA antisense | UGAAuucGGcAGcucGGccTsT | 2046 |
| | | | (4373C) stab25 | | |
| 8280 | UAGGUGAUGUAUGGCUAAGAUUU | 1943 | HDAC4: 8298L21 siNA antisense | AUCuuAGccAuAcAucAccTsT | 2047 |
| | | | (8280C) stab25 | | |
| 719 | GAGCUCGUUGGAGCUAUCGUUUC | 1944 | HDAC4: 737L21 siNA antisense | AACGAuAGcuccAAcGAGcTsT | 2048 |
| | | | (719C) stab25 | | |
| 5829 | AGGAGGGACCGUAGGUCUUUUCG | 1945 | HDAC4: 5847L21 siNA antisense | AAAAGAccuAcGGucccucTsT | 2049 |
| | | | (5829C) stab25 | | |
| 720 | AGCUCGUUGGAGCUAUCGUUUCC | 1946 | HDAC4: 738L21 siNA antisense | AAAcGAuAGcuccAAcGAGTsT | 2050 |
| | | | (720C) stab25 | | |
| 7892 | AAGUUUGCGUCUUAUUGAACUUA | 1947 | HDAC4: 7910L21 siNA antisense | AGUucAAuAAGAcGcAAAcTsT | 2051 |
| | | | (7892C) stab25 | | |
| 8196 | GUGACGGUUUAUUCUGAUUGAGA | 1948 | HDAC4: 8214L21 siNA antisense | UCAAucAGAAuAAAccGucTsT | 2052 |
| | | | (8196C) stab25 | | |

HDAC5

| | | | | | |
|---|---|---|---|---|---|
| 1771 | CAGCAUGCGGACGGUAGGCAAGC | 2643 | HDAC5v1: 1771U21 siNA sense | GCAUGCGGACGGUAGGCAATT | 2651 |
| 3771 | AAGUCACACAUUCAACAAGGUGU | 2644 | HDAC5v1: 3771U21 siNA sense | GUCACACAUUCAACAAGGUTT | 2652 |
| 321 | GGCCCAGAGCCGGCAUGAACUCU | 2645 | HDAC5v1: 321U21 siNA sense | CCCAGAGCCGGCAUGAACUTT | 2653 |
| 1031 | GGGACGCCUCCCUCCUACAAACU | 2646 | HDAC5v1: 1031U21 siNA sense | GACGCCUCCCUCCUACAAATT | 2654 |
| 1182 | GUCGCAAGGAUGGGACUGUUAUU | 2647 | HDAC5v1: 1182U21 siNA sense | CGCAAGGAUGGGACUGUUATT | 2655 |
| 1251 | GGGCGUCGUCCGUGUGUAACAGC | 2648 | HDAC5v1: 1251U21 siNA sense | GCGUCGUCCGUGUGUAACATT | 2656 |
| 1567 | CACGCUGACCGGCAAGUUCAUGA | 2649 | HDAC5v1: 1567U21 siNA sense | CGCUGACCGGCAAGUUCAUTT | 2657 |
| 2196 | AGCCUGGUGCUGGAUACAAAAAA | 2650 | HDAC5v1: 2196U21 siNA sense | CCUGGUGCUGGAUACAAAATT | 2658 |
| 1771 | CAGCAUGCGGACGGUAGGCAAGC | 2643 | HDAC5v1: 1789L21 siNA antisense | UUGCCUACCGUCCGCAUGCTT | 2659 |
| | | | (1771C) | | |
| 3771 | AAGUCACACAUUCAACAAGGUGU | 2644 | HDAC5v1: 3789L21 siNA antisense | ACCUUGUUGAAUGUGUGACTT | 2660 |
| | | | (3771C) | | |
| 321 | GGCCCAGAGCCGGCAUGAACUCU | 2645 | HDAC5v1: 339L21 siNA antisense | AGUUCAUGCCGGCUCUGGGTT | 2661 |
| | | | (321C) | | |
| 1031 | GGGACGCCUCCCUCCUACAAAGU | 2646 | HDAC5v1: 1049L21 siNA antisense | UUUGUAGGAGGGAGGCGUCTT | 2662 |
| | | | (1031C) | | |
| 1182 | GUCGCAAGGAUGGGACUGUUAUU | 2647 | HDAC5v1: 1200L21 siNA antisense | UAACAGUCCCAUCCUUGCGTT | 2663 |
| | | | (1182C) | | |
| 1251 | GGGCGUCGUCCGUGUGUAACAGC | 2648 | HDAC5v1: 1269L21 siNA antisense | UGUUACACACGGACGACGCTT | 2664 |
| | | | (1251C) | | |
| 1567 | CACGCUGACCGGCAAGUUCAUGA | 2649 | HDAC5v1: 1585L21 siNA antisense | AUGAACUUGCCGGUCAGCGTT | 2665 |
| | | | (1567C) | | |
| 2196 | AGCCUGGUGCUGGAUACAAAAAA | 2650 | HDAC5v1: 2214L21 siNA antisense | UUUUGUAUCCAGCACCAGGTT | 2666 |
| | | | (2196C) | | |
| 1771 | CAGCAUGCGGACGGUAGGCAAGC | 2643 | HDAC5v1: 1771U21 siNA sense | B GcAuGcGGAcGGuAGGcAATT B | 2667 |
| | | | stab04 | | |
| 3771 | AAGUCACACAUUCAACAAGGUGU | 2644 | HDAC5v1: 3771U21 siNA sense | B GucAcAcAuucAAcAAGGuTT B | 2668 |
| | | | stab04 | | |
| 321 | GGCCCAGAGCCGGCAUGAACUCU | 2645 | HDAC5v1: 321U21 siNA sense | B cccAGAGccGGcAuGAAcuTT B | 2669 |
| | | | stab04 | | |
| 1031 | GGGACGCCUCCCUCCUACAAACU | 2646 | HDAC5v1: 1031U21 siNA sense | B GAcGccucccuccuAcAAATT B | 2670 |
| | | | stab04 | | |
| 1182 | GUCGCAAGGAUGGGACUGUUAUU | 2647 | HDAC5v1: 1182U21 siNA sense | B cGcAAGGAuGGGAcuGuuATT B | 2671 |
| | | | stab04 | | |
| 1251 | GGGCGUCGUCCGUGUGUAACAGC | 2648 | HDAC5v1: 1251U21 siNA sense | B GcGucGuccGuGuGuAAcATT B | 2672 |
| | | | stab04 | | |
| 1567 | CACGCUGACCGGCAAGUUCAUGA | 2649 | HDAC5v1: 1567U21 siNA sense | B cGcuGAccGGcAAGuucAuTT B | 2673 |
| | | | stab04 | | |
| 2196 | AGCCUGGUGCUGGAUACAAAAAA | 2650 | HDAC5v1: 2196U21 siNA sense | B ccuGGuGcuGGAuAcAAAATT B | 2674 |
| | | | stab04 | | |
| 1771 | CAGCAUGCGGACGGUAGGCAAGC | 2643 | HDAC5v1: 1789L21 siNA antisense | uuGccuAccGuccGcAuGcTsT | 2675 |
| | | | (1771C) stab05 | | |
| 3771 | AAGUCACACAUUCAACAAGGUGU | 2644 | HDAC5v1: 3789L21 siNA antisense | AccuuGuuGAAuGuGuGAcTsT | 2676 |
| | | | (3771C) stab05 | | |
| 321 | GGCCCAGAGCCGGCAUGAACUCU | 2645 | HDAC5v1: 339L21 siNA antisense | AGuucAuGccGGcucuGGGTsT | 2677 |
| | | | (321C) stab05 | | |
| 1031 | GGGACGCCUCCCUCCUACAAACU | 2646 | HDAC5v1: 1049L21 siNA antisense | uuuGuAGGAGGGAGGcGucTsT | 2678 |
| | | | (1031C) stab05 | | |
| 1182 | GUCGCAAGGAUGGGACUGUUAUU | 2647 | HDAC5v1: 1200L21 siNA antisense | uAAcAGucccAuccuuGcGTsT | 2679 |
| | | | (1182C) stab05 | | |
| 1251 | GGGCGUCGUCCGUGUGUAACAGC | 2648 | HDAC5v1: 1269L21 siNA antisense | uGuuAcAcAcGGAcGAcGcTsT | 2680 |
| | | | (1251C) stab05 | | |
| 1567 | CACGCUGACCGGCAAGUUCAUGA | 2649 | HDAC5v1: 1585L21 siNA antisense | AuGAAcuuGccGGucAGcGTsT | 2681 |
| | | | (1567C) stab05 | | |
| 2196 | AGCCUGGUGCUGGAUACAAAAAA | 2650 | HDAC5v1: 2214L21 siNA antisense | uuuuGuAuccAGcAccAGGTsT | 2682 |
| | | | (2196C) stab05 | | |
| 1771 | CAGCAUGCGGACGGUAGGCAAGC | 2643 | HDAC5v1: 1771U21 siNA sense | B GcAuGcGGAcGGuAGGcAATT B | 2683 |
| | | | stab07 | | |
| 3771 | AAGUCACACAUUCAACAAGGUGU | 2644 | HDAC5v1: 3771U21 siNA sense | B GucAcAcAuucAAcAAGGUTT B | 2684 |
| | | | stab07 | | |
| 321 | GGCCCAGAGCCGGCAUGAACUCU | 2645 | HDAC5v1: 321U21 siNA sense | B cccAGAGccGGcAuGAAcuTT B | 2685 |
| | | | stab07 | | |
| 1031 | GGGACGCCUCCCUCCUACAAACU | 2646 | HDAC5v1: 1031U21 siNA sense | B GAcGCcucccuccuAcAAATT B | 2686 |
| | | | stab07 | | |
| 1182 | GUCGCAAGGAUGGGACUGUUAUU | 2647 | HDAC5v1: 1182U21 siNA sense | B cGcAAGGAuGGGAcuGuuATT B | 2687 |
| | | | stab07 | | |
| 1251 | GGGCGUCGUCCGUGUGUAACAGC | 2648 | HDAC5v1: 1251U21 siNA sense | B GcGucGuccGuGuGuAAcATT B | 2688 |
| | | | stab07 | | |
| 1567 | CACGCUGACCGGCAAGUUCAUGA | 2649 | HDAC5v1: 1567U21 siNA sense | B cGcuGAccGGcAAGuucAuTT B | 2689 |
| | | | stab07 | | |
| 2196 | AGCCUGGUGCUGGAUACAAAAAA | 2650 | HDAC5v1: 2196U21 siNA sense | B ccuGGuGcuGGAuAcAAAATT B | 2690 |
| | | | stab07 | | |
| 1771 | CAGCAUGCGGACGGUAGGCAAGC | 2643 | HDAC5v1: 1789L21 siNA antisense | uuGccuAccGuccGcAuGcTsT | 2691 |
| | | | (1771C) stab11 | | |
| 3771 | AAGUCACACAUUCAACAAGGUGU | 2644 | HDAC5v1: 3789L21 siNA antisense | AccuuGuuGAAuGuGuGAcTsT | 2692 |
| | | | (3771C) stab11 | | |
| 321 | GGCCCAGAGCCGGCAUGAACUCU | 2645 | HDAC5v1: 339L21 siNA antisense | AGuucAuGccGGcucuGGGTsT | 2693 |
| | | | (321C) stab11 | | |
| 1031 | GGGACGCCUCCCUCCUACAAACU | 2646 | HDAC5v1: 1049L21 siNA antisense | uuuGuAGGAGGGAGGcGucTsT | 2694 |
| | | | (1031C) stab11 | | |
| 1182 | GUCGCAAGGAUGGGACUGUUAUU | 2647 | HDAC5v1: 1200L21 siNA antisense | uAAcAGucccAuccuuGcGTsT | 2695 |
| | | | (1182C) stab11 | | |
| 1251 | GGGCGUCGUCCGUGUGUAACAGC | 2648 | HDAC5v1: 1269L21 siNA antisense | uGuuAcAcAcGGAcGAcGcTsT | 2696 |
| | | | (1251C) stab11 | | |
| 1567 | CACGCUGACCGGCAAGUUCAUGA | 2649 | HDAC5v1: 1585L21 siNA antisense | AuGAAcuuGccGGucAGcGTsT | 2697 |
| | | | (1567C) stab11 | | |
| 2196 | AGCCUGGUGCUGGAUACAAAAAA | 2650 | HDAC5v1: 2214L21 siNA antisense | uuuuGuAuccAGcAccAGGTsT | 2698 |
| | | | (2196C) stab11 | | |
| 1771 | CAGCAUGCGGACGGUAGGCAAGC | 2643 | HDAC5v1: 1771U21 siNA sense | B GcAuGcGGAcGGuAGGcAATT B | 2699 |
| | | | stab18 | | |
| 3771 | AAGUCACACAUUCAACAAGGUGU | 2644 | HDAC5v1: 3771U21 siNA sense | B GucAcAcAuucAAcAAGGuTT B | 2700 |
| | | | stab18 | | |
| 321 | GGCCCAGAGCCGGCAUGAACUCU | 2645 | HDAC5v1: 321U21 siNA sense | B cccAGAGccGGcAuGAAcuTT B | 2701 |
| | | | stab18 | | |
| 1031 | GGGACGCCUCCCUCCUACAAACU | 2646 | HDAC5v1: 1031U21 siNA sense | B GAcGccucccuccuAcAAATT B | 2702 |
| | | | stab18 | | |
| 1182 | GUCGCAAGGAUGGGACUGUUAUU | 2647 | HDAC5v1: 1182U21 siNA sense | B cGcAAGGAuGGGAcuGuuATT B | 2703 |
| | | | stab18 | | |
| 1251 | GGGCGUCGUCCGUGUGUAACAGC | 2648 | HDAC5v1: 1251U21 siNA sense | B GcGucGuccGuGuGuAAcATT B | 2704 |
| | | | stab18 | | |
| 1567 | CACGCUGACCGGCAAGUUCAUGA | 2649 | HDAC5v1: 1567U21 siNA sense | B cGcuGAccGGcAAGuucAuTT B | 2705 |
| | | | stab18 | | |
| 2196 | AGCCUGGUGCUGGAUACAAAAAA | 2650 | HDAC5v1: 2196U21 siNA sense | B ccuGGuGcuGGAuAcAAAATT B | 2706 |
| | | | stab18 | | |
| 1771 | CAGCAUGCGGACGGUAGGCAAGC | 2643 | HDAC5v1: 1789L21 siNA antisense | uuGccuAccGuccGcAuGcTsT | 2707 |
| | | | (1771C) stab08 | | |
| 3771 | AAGUCACACAUUCAACAAGGUGU | 2644 | HDAC5v1: 3789L21 siNA antisense | AccuuGuuGAAuGuGuGAcTsT | 2708 |
| | | | (3771C) stab08 | | |
| 321 | GGCCCAGAGCCGGCAUGAACUCU | 2645 | HDAC5v1: 339L21 siNA antisense | AGuucAuGccGGcucuGGGTsT | 2709 |
| | | | (321C) stab08 | | |
| 1031 | GGGACGCCUCCCUCCUACAAACU | 2646 | HDAC5v1: 1049L21 siNA antisense | uuuGuAGGAGGGAGGcGucTsT | 2710 |
| | | | (1031C) stab08 | | |
| 1182 | GUCGCAAGGAUGGGACUGUUAUU | 2647 | HDAC5v1: 1200L21 siNA antisense | uAAcAGucccAuccuuGcGTsT | 2711 |
| | | | (1182C) stab08 | | |
| 1251 | GGGCGUCGUCCGUGUGUAACAGC | 2648 | HDAC5v1: 1269L21 siNA antisense | uGuuAcAcAcGGAcGAcGcTsT | 2712 |
| | | | (1251C) stab08 | | |
| 1567 | CACGCUGACCGGCMGUUCAUGA | 2649 | HDAC5v1: 1585L21 siNA antisense | AuGAAcuuGccGGucAGcGTsT | 2713 |
| | | | (1567C) stab08 | | |
| 2196 | AGCCUGGUGCUGGAUACAAAAAA | 2650 | HDAC5v1:2214L21 siNA antisense | uuuuGuAuccAGcAccAGGTsT | 2714 |
| | | | (2196C) stab08 | | |
| 1771 | CAGCAUGCGGACGGUAGGCAAGC | 2643 | HDAC5v1: 1771U21 siNA sense | B GCAUGCGGACGGUAGGCAATT B | 2715 |
| | | | stab09 | | |
| 3771 | AAGUCACACAUUCAACAAGGUGU | 2644 | HDAC5v1: 3771U21 siNA sense | B GUCACACAUUCAACAAGGUTT B | 2716 |
| | | | stab09 | | |
| 321 | GGCCCAGAGCCGGCAUGAACUCU | 2645 | HDAC5v1: 321U21 siNA sense | B CCCAGAGCCGGCAUGAACUTT B | 2717 |
| | | | stab09 | | |
| 1031 | GGGACGCCUCCCUCCUACAAACU | 2646 | HDAC5v1: 1031U21 siNA sense | B GACGCCUCCCUCCUACAAATT B | 2718 |
| | | | stab09 | | |
| 1182 | GUCGCAAGGAUGGGACUGUUAUU | 2647 | HDAC5v1: 1182U21 siNA sense | B CGCAAGGAUGGGACUGUUATT B | 2719 |
| | | | stab09 | | |
| 1251 | GGGCGUCGUCCGUGUGUAACAGC | 2648 | HDAC5v1: 1251U21 siNA sense | B GCGUCGUCCGUGUGUAACATT B | 2720 |
| | | | stab09 | | |
| 1567 | CACGCUGACCGGCAAGUUCAUGA | 2649 | HDAC5v1: 1567U21 siNA sense | B CGCUGACCGGCAAGUUCAUTT B | 2721 |
| | | | stab09 | | |
| 2196 | AGCCUGGUGCUGGAUACAAAAAA | 2650 | HDAC5v1: 2196U21 siNA sense | B CCUGGUGCUGGAUACAAAATT B | 2722 |
| | | | stab09 | | |
| 1771 | CAGCAUGCGGACGGUAGGCAAGC | 2643 | HDAC5v1: 1789L21 siNA antisense | UUGCCUACCGUCCGCAUGCTsT | 2723 |
| | | | (1771C) stab10 | | |
| 3771 | AAGUCACACAUUCAACAAGGUGU | 2644 | HDAC5v1: 3789L21 siNA antisense | ACCUUGUUGAAUGUGUGACTsT | 2724 |
| | | | (3771C) stab10 | | |
| 321 | GGCCCAGAGCCGGCAUGAACUCU | 2645 | HDAC5v1: 339L21 siNA antisense | AGUUCAUGCCGGCUCUGGGTsT | 2725 |
| | | | (321C) stab10 | | |
| 1031 | GGGACGCCUCCCUCCUACAAACU | 2646 | HDAC5v1: 1049L21 siNA antisense | UUUGUAGGAGGGAGGCGUCTsT | 2726 |
| | | | (1031C) stab10 | | |
| 1182 | GUCGCAAGGAUGGGACUGUUAUU | 2647 | HDAC5v1: 1200L21 siNA antisense | UAACAGUCCCAUCCUUGCGTsT | 2727 |
| | | | (1182C) stab10 | | |
| 1251 | GGGCGUCGUCCGUGUGUAACAGC | 2648 | HDAC5v1: 1269L21 siNA antisense | UGUUACACACGGACGACGCTsT | 2728 |
| | | | (1251C) stab10 | | |
| 1567 | CACGCUGACCGGCAAGUUCAUGA | 2649 | HDAC5v1: 1585L21 siNA antisense | AUGAACUUGCCGGUCAGCGTsT | 2729 |
| | | | (1567C) stab10 | | |
| 2196 | AGCCUGGUGCUGGAUACAAAAAA | 2650 | HDAC5v1: 2214L21 siNA antisense | UUUUGUAUCCAGCACCAGGTsT | 2730 |
| | | | (2196C) stab10 | | |
| 1771 | CAGCAUGCGGACGGUAGGCAAGC | 2643 | HDAC5v1: 1789L21 siNA antisense | uuGccuAccGuccGcAuGcTT B | 2731 |
| | | | (1771C) stab19 | | |
| 3771 | AAGUCACACAUUCAACAAGGUGU | 2644 | HDAC5v1: 3789L21 siNA antisense | AccuuGuuGAAuGuGuGAcTT B | 2732 |
| | | | (3771C) stab19 | | |
| 321 | GGCCCAGAGCCGGCAUGAACUCU | 2645 | HDAC5v1: 339L21 siNA antisense | AGuucAuGccGGcucuGGGTT B | 2733 |
| | | | (321C) stab19 | | |
| 1031 | GGGACGCCUCCCUCCUACAAACU | 2646 | HDAC5v1: 1049L21 siNA antisense | uuuGuAGGAGGGAGGcGucTT B | 2734 |
| | | | (1031C) stab19 | | |
| 1182 | GUCGCAAGGAUGGGACUGUUAUU | 2647 | HDAC5v1: 1200L21 siNA antisense | uAAcAGucccAuccuuGcGTT B | 2735 |
| | | | (1182C) stab19 | | |
| 1251 | GGGCGUCGUCCGUGUGUAACAGC | 2648 | HDAC5v1: 1269L21 siNA antisense | uGuuAcAcAcGGAcGAcGcTT B | 2736 |
| | | | (1251C) stab19 | | |
| 1567 | CACGCUGACCGGCAAGUUCAUGA | 2649 | HDAC5v1: 1585L21 siNA antisense | AuGAAcuuGccGGucAGcGTT B | 2737 |
| | | | (1567C) stab19 | | |
| 2196 | AGCCUGGUGCUGGAUACAAAAAA | 2650 | HDAC5v1: 2214L21 siNA antisense | uuuuGuAuccAGcAccAGGTT B | 2738 |
| | | | (2196C) stab19 | | |
| 1771 | CAGCAUGCGGACGGUAGGCAAGC | 2643 | HDAC5v1: 1789L21 siNA antisense | UUGCCUACCGUCCGCAUGCTT B | 2739 |
| | | | (1771C) stab22 | | |
| 3771 | AAGUCACACAUUCAACAAGGUGU | 2644 | HDAC5v1: 3789L21 siNA antisense | ACCUUGUUGAAUGUGUGACTT B | 2740 |
| | | | (3771C) stab22 | | |
| 321 | GGCCCAGAGCCGGCAUGAACUCU | 2645 | HDAC5v1: 339L21 siNA antisense | AGUUCAUGCCGGCUCUGGGTT B | 2741 |
| | | | (321C) stab22 | | |
| 1031 | GGGACGCCUCCCUCCUACAAACU | 2646 | HDAC5v1: 1049L21 siNA antisense | UUUGUAGGAGGGAGGCGUCTT B | 2742 |
| | | | (1031C) stab22 | | |
| 1182 | GUCGCAAGGAUGGGACUGUUAUU | 2647 | HDAC5v1: 1200L21 siNA antisense | UAACAGUCCCAUCCUUGCGTT B | 2743 |
| | | | (1182C) stab22 | | |
| 1251 | GGGCGUCGUCCGUGUGUAACAGC | 2648 | HDAC5v1: 1269L21 siNA antisense | UGUUACACACGGACGACGCTT B | 2744 |
| | | | (1251C) stab22 | | |
| 1567 | CACGCUGACCGGCAAGUUCAUGA | 2649 | HDAC5v1: 1585L21 siNA antisense | AUGAACUUGCCGGUCAGCGTT B | 2745 |
| | | | (1567C) stab22 | | |
| 2196 | AGCCUGGUGCUGGAUACAAAAAA | 2650 | HDAC5v1: 2214L21 siNA antisense | UUUUGUAUCCAGCACCAGGTT B | 2746 |
| | | | (2196C) stab22 | | |
| 1771 | CAGCAUGCGGACGGUAGGCAAGC | 2643 | HDAC5v1: 1789L21 siNA antisense | UUGccuAccGuccGcAuGcTsT | 2747 |
| | | | (1771C) stab25 | | |
| 3771 | AAGUCACACAUUCAACAAGGUGU | 2644 | HDAC5v1: 3789L21 siNA antisense | ACCuuGuuGAAuGuGuGAcTsT | 2748 |
| | | | (3771C) stab25 | | |
| 321 | GGCCCAGAGCCGGCAUGAACUCU | 2645 | HDAC5v1: 339L21 siNA antisense | AGUucAuGccGGcucuGGGTsT | 2749 |
| | | | (321C) stab25 | | |
| 1031 | GGGACGCCUCCCUCCUACAAACU | 2646 | HDAC5v1: 1049L21 siNA antisense | UUUGuAGGAGGGAGGcGucTsT | 2750 |
| | | | (1031C) stab25 | | |
| 1182 | GUCGCAAGGAUGGGACUGUUAUU | 2647 | HDAC5v1: 1200L21 siNA antisense | UAAcAGucccAuccuuGcGTsT | 2751 |
| | | | (1182C) stab25 | | |
| 1251 | GGGCGUCGUCCGUGUGUAACAGC | 2648 | HDAC5v1: 1269L21 siNA antisense | UGUuAcAcAcGGAcGAcGcTsT | 2752 |
| | | | (1251C) stab25 | | |
| 1567 | CACGCUGACCGGCAAGUUCAUGA | 2649 | HDAC5v1: 1585L21 siNA antisense | AUGAAcuuGccGGucAGcGTsT | 2753 |
| | | | (1567C) stab25 | | |
| 2196 | AGCCUGGUGCUGGAUACAAAAAA | 2650 | HDAC5v1: 2214L21 siNA antisense | UUUuGuAuccAGcAccAGGTsT | 2754 |
| | | | (2196C) stab25 | | |

HDAC6

| | | | | | |
|---|---|---|---|---|---|
| 825 | AUCCGGAGGGUCCUUAUCGUAGA | 3209 | HDAC6: 825U21 siNA sense | CCGGAGGGUCCUUAUCGUATT | 3217 |
| 3904 | AAGAGAACUGCGACGAUUAAUUG | 3210 | HDAC6: 3904U21 siNA sense | GAGAACUGCGACGAUUAAUTT | 3218 |
| 178 | GUGUCACUUCGAAGCGAAAUAUU | 3211 | HDAC6: 178U21 siNA sense | GUCACUUCGAAGCGAAAUATT | 3219 |
| 1540 | GGCUGGUCUAUGACCAAAAUAUG | 3212 | HDAC6: 1540U21 siNA sense | CUGGUCUAUGACCAAAAUATT | 3220 |
| 1773 | CACCGUGAGAGUUCCAACUUUGA | 3213 | HDAC6: 1773U21 siNA sense | CCGUGAGAGUUCCAACUUUTT | 3221 |
| 923 | CCGCUACGAGCAGGGUAGGUUCU | 3214 | HDAC6: 923U21 siNA sense | GCUACGAGCAGGGUAGGUUTT | 3222 |
| 596 | AGCAGACACCUACGA0UCAGUUU | 3215 | HDAC6: 596U21 siNA sense | CAGACACCUACGACUCAGUTT | 3223 |
| 2688 | GAGCGGAUGACCACACGAGAAAA | 3216 | HDAC6: 2688U21 siNA sense | GCGGAUGACCACACGAGAATT | 3224 |
| 825 | AUCCGGAGGGUCCUUAUCGUAGA | 3209 | HDAC6: 843L21 siNA antisense | UACGAUAAGGACCCUCCGGTT | 3225 |
| | | | (825C) | | |
| 3904 | AAGAGAACUGCGACGAUUAAUUG | 3210 | HDAC6: 3922L21 siNA antisense | AUUAAUCGUCGCAGUUCUCTT | 3226 |
| | | | (3904C) | | |
| 178 | GUGUCACUUCGAAGCGAAAUAUU | 3211 | HDAC6: 196L21 siNA antisense | UAUUUCGCUUCGAAGUGACTT | 3227 |
| | | | (178C) | | |
| 1540 | GGCUGGUCUAUGACCAAAAUAUG | 3212 | HDAC6: 1558L21 siNA antisense | UAUUUUGGUCAUAGACCAGTT | 3228 |
| | | | (1540C) | | |
| 1773 | CACCGUGAGAGUUCCAACUUUGA | 3213 | HDAC6: 1791L21 siNA antisense | AAAGUUGGAACUCUCACGGTT | 3229 |
| | | | (1773C) | | |
| 923 | CCGCUACGAGCAGGGUAGGUUCU | 3214 | HDAC6: 941L21 siNA antisense | AACCUACCCUGCUCGUAGCTT | 3230 |
| | | | (923C) | | |
| 596 | AGCAGACACCUACGACUCAGUUU | 3215 | HDAC6: 614L21 siNA antisense | ACUGAGUCGUAGGUGUCUGTT | 3231 |
| | | | (596C) | | |
| 2688 | GAGCGGAUGACCACACGAGAAAA | 3216 | HDAC6: 2706L21 siNA antisense | UUCUCGUGUGGUCAUCCGCTT | 3232 |
| | | | (2688C) | | |
| 825 | AUCCGGAGGGUCCUUAUCGUAGA | 3209 | HDAC6: 825U21 siNA sense stab04 | B ccGGAGGGuccuuAucGuATT B | 3233 |
| 3904 | AAGAGAACUGCGACGAUUAAUUG | 3210 | HDAC6: 3904U21 siNA sense | B GAGAAcuGcGAcGAuuAAuTT B | 3234 |
| | | | stab04 | | |
| 178 | GUGUCACUUCGAAGCGAAAUAUU | 3211 | HDAC6: 178U21 siNA sense stab04 | B GucAcuucGAAGcGAAAuATT B | 3235 |
| 1540 | GGCUGGUCUAUGACCAAAAUAUG | 3212 | HDAC6: 1540U21 siNA sense | B cuGGucuAuGAccAAAAuATT B | 3236 |
| | | | stab04 | | |
| 1773 | CACCGUGAGAGUUCCAACUUUGA | 3213 | HDAC6: 1773U21 siNA sense | B CCGuGAGAGuuccAAcuuuTT B | 3237 |
| | | | stab04 | | |
| 923 | CCGCUACGAGCAGGGUAGGUUCU | 3214 | HDAC6: 923U21 siNA sense stab04 | B GcuAcGAGcAGGGuAGGuuTT B | 3238 |
| 596 | AGCAGACACCUACGACUCAGUUU | 3215 | HDAC6: 596U21 siNA sense stab04 | B cAGAcAccuAcGAcucAGuTT B | 3239 |
| 2688 | GAGCGGAUGACCACACGAGAAAA | 3216 | HDAC6: 2688U21 siNA sense | B GcGGAuGAccAcAcGAGAATT B | 3240 |
| | | | stab04 | | |
| 825 | AUCCGGAGGGUCCUUAUCGUAGA | 3209 | HDAC6: 843L21 siNA antisense | uAcGAuAAGGAcccuccGGTsT | 3241 |
| | | | (825C) stab05 | | |
| 3904 | AAGAGAACUGCGACGAUUAAUUG | 3210 | HDAC6: 3922L21 siNA antisense | AuuAAucGucGcAGuucucTsT | 3242 |
| | | | (3904C) stab05 | | |
| 178 | GUGUCACUUCGAAGCGAAAUAUU | 3211 | HDAC6: 196L21 siNA antisense | uAuuucGcuucGAAGuGAcTsT | 3243 |
| | | | (178C) stab05 | | |
| 1540 | GGCUGGUCUAUGACCAAAAUAUG | 3212 | HDAC6: 1558L21 siNA antisense | uAuuuuGGucAuAGAccAGTsT | 3244 |
| | | | (1540C) stab05 | | |
| 1773 | CACCGUGAGAGUUCCAACUUUGA | 3213 | HDAC6: 1791L21 siNA antisense | AAAGuuGGAAcucucAcGGTsT | 3245 |
| | | | (1773C) stab05 | | |
| 923 | CCGCUACGAGCAGGGUAGGUUCU | 3214 | HDAC6: 941L21 siNA antisense | AAccuAcccuGcucGuAGcTsT | 3246 |
| | | | (923C) stab05 | | |
| 596 | AGCAGACACCUACGACUCAGUUU | 3215 | HDAC6: 614L21 siNA antisense | | |
| | | | (596C) stab05 | AcuGAGucGuAGGuGucuGTsT | 3247 |
| 2688 | GAGCGGAUGACCACACGAGAAAA | 3216 | HDAC6: 2706L21 siNA antisense | uucucGuGuGGucAuccGcTsT | 3248 |
| | | | (2688C) stab05 | | |
| 825 | AUCCGGAGGGUCCUUAUCGUAGA | 3209 | HDAC6: 825U21 siNA sense stab07 | B ccGGAGGGuccuuAucGuATT B | 3249 |
| 3904 | AAGAGAACUGCGACGAUUAAUUG | 3210 | HDAC6: 3904U21 siNA sense | B GAGAACuGCGACGAUUAAUTT B | 3250 |
| | | | stab07 | | |
| 178 | GUGUCACUUCGAAGCGAAAUAUU | 3211 | HDAC6: 178U21 siNA sense stab07 | B GucAcuucGAAGcGAAAuATT B | 3251 |
| 1540 | GGCUGGUCUAUGACCAAAAUAUG | 3212 | HDAC6: 1540U21 siNA sense | B cuGGucuAuGAccAAAAuATT B | 3252 |
| | | | stab07 | | |
| 1773 | CACCGUGAGAGUUCCAACUUUGA | 3213 | HDAC6: 1773U21 siNA sense | B ccGuGAGAGuuccAAcuuuTT B | 3253 |
| | | | stab07 | | |
| 923 | CCGCUACGAGCAGGGUAGGUUCU | 3214 | HDAC6: 923U21 siNA sense stab07 | B GcuAcGAGcAGGGuAGGuuTT B | 3254 |
| 596 | AGCAGACACCUACGACUCAGUUU | 3215 | HDAC6: 596U21 siNA sense stab07 | B cAGAcAccuAcGAcucAGuTT B | 3255 |
| 2688 | GAGCGGAUGACCACACGAGAAAA | 3216 | HDAC6: 2688U21 siNA sense | B GcGGAuGAccAcAcGAGAATT B | 3256 |
| | | | stab07 | | |
| 825 | AUCCGGAGGGUCCUUAUCGUAGA | 3209 | HDAC6: 843L21 siNA antisense | uAcGAuAAGGAcccuccGGTsT | 3257 |
| | | | (825C) stab11 | | |
| 3904 | AAGAGAACUGCGACGAUUAAUUG | 3210 | HDAC6: 3922L21 siNA antisense | AuuAAucGucGcAGuucucTsT | 3258 |
| | | | (3904C) stab11 | | |
| 178 | GUGUCACUUCGAAGCGAAAUAUU | 3211 | HDAC6: 196L21 siNA antisense | uAuuucGcuucGAAGuGAcTsT | 3259 |
| | | | (178C) stab11 | | |
| 1540 | GGCUGGUCUAUGACCAAAAUAUG | 3212 | HDAC6: 1558L21 siNA antisense | uAuuuuGGucAuAGAccAGTsT | 3260 |
| | | | (1540C) stab11 | | |
| 1773 | CACCGUGAGAGUUCCAACUUUGA | 3213 | HDAC6: 1791L21 siNA antisense | AAAGuuGGAAcucucAcGGTsT | 3261 |
| | | | (1773C) stab11 | | |
| 923 | CCGCUACGAGCAGGGUAGGUUCU | 3214 | HDAC6: 941L21 siNA antisense | AAccuAcccuGcucGuAGcTsT | 3262 |
| | | | (923C) stab11 | | |
| 596 | AGCAGACACCUACGACUCAGUUU | 3215 | HDAC6: 614L21 siNA antisense | AcuGAGucGuAGGuGucuGTsT | 3263 |
| | | | (596C) stab11 | | |
| 2688 | GAGCGGAUGACCACACGAGAAAA | 3216 | HDAC6: 2706L21 siNA antisense | uucucGuGuGGucAuccGcTsT | 3264 |
| | | | (2688C) stab11 | | |
| 825 | AUCCGGAGGGUCCUUAUCGUAGA | 3209 | HDAC6: 825U21 siNA sense stab18 | B ccGGAGGGuccuuAucGuATT B | 3265 |
| 3904 | AAGAGAACUGCGACGAUUAAUUG | 3210 | HDAC6: 3904U21 siNA sense | B GAGAAcuGcGAcGAuuAAuTT B | 3266 |
| | | | stab18 | | |
| 178 | GUGUCACUUCGAAGCGAAAUAUU | 3211 | HDAC6: 178U21 siNA sense stab18 | B GucAcuucGAAGcGAAAuATT B | 3267 |
| 1540 | GGCUGGUCUAUGACCAAAAUAUG | 3212 | HDAC6: 1540U21 siNA sense | B cuGGucuAuGAccAAAAuATT B | 3268 |
| | | | stab18 | | |
| 1773 | CACCGUGAGAGUUCCAACUUUGA | 3213 | HDAC6: 1773U21 siNA sense | B ccGuGAGAGuuccAAcuuuTT B | 3269 |
| | | | stab18 | | |
| 923 | CCGCUACGAGCAGGGUAGGUUCU | 3214 | HDAC6: 923U21 siNA sense stab18 | B GcuAcGAGcAGGGuAGGuuTT B | 3270 |
| 596 | AGCAGACACCUACGACUCAGUUU | 3215 | HDAC6: 596U21 siNA sense stab18 | B cAGAcAccuAcGAcucAGuTT B | 3271 |
| 2688 | GAGCGGAUGACCACACGAGAAAA | 3216 | HDAC6: 2688U21 siNA sense | B GcGGAuGAccAcAcGAGAATT B | 3272 |
| | | | stab18 | | |
| 825 | AUCCGGAGGGUCCUUAUCGUAGA | 3209 | HDAC6: 843L21 siNA antisense | uAcGAuAAGGAcccuccGGTsT | 3273 |
| | | | (825C) stab08 | | |
| 3904 | AAGAGAACUGCGACGAUUAAUUG | 3210 | HDAC6: 3922L21 siNA antisense | AuuAAucGucGcAGuucucTsT | 3274 |
| | | | (3904C) stab08 | | |
| 178 | GUGUCACUUCGAAGCGAAAUAUU | 3211 | HDAC6: 196L21 siNA antisense | uAuuucGcuucGAAGuGAcTsT | 3275 |
| | | | (178C) stab08 | | |
| 1540 | GGCUGGUCUAUGACCAAAAUAUG | 3212 | HDAC6: 1558L21 siNA antisense | uAuuuuGGucAuAGAccAGTsT | 3276 |
| | | | (1540C) stab08 | | |
| 1773 | CACCGUGAGAGUUCCAACUUUGA | 3213 | HDAC6: 1791L21 siNA antisense | AAAGuuGGAAcucucAcGGTsT | 3277 |
| | | | (1773C) stab08 | | |
| 923 | CCGCUACGAGCAGGGUAGGUUCU | 3214 | HDAC6: 941L21 siNA antisense | AAccuAcccuGcucGuAGcTsT | 3278 |
| | | | (923C) stab08 | | |
| 596 | AGCAGACACCUACGACUCAGUUU | 3215 | HDAC6: 614L21 siNA antisense | AcuGAGucGuAGGuGucuGTsT | 3279 |
| | | | (596C) stab08 | | |
| 2688 | GAGCGGAUGACCACACGAGAAAA | 3216 | HDAC6: 2706L21 siNA antisense | uucucGuGuGGucAuccGcTsT | 3280 |
| | | | (2688C) stab08 | | |
| 825 | AUCCGGAGGGUCCUUAUCGUAGA | 3209 | HDAC6: 825U21 siNA sense stab09 | B CCGGAGGGUCCUUAUCGUATT B | 3281 |
| 3904 | AAGAGAACUGCGACGAUUAAUUG | 3210 | HDAC6: 3904U21 siNA sense | B GAGAACUGCGACGAUUAAUTT B | 3282 |
| | | | stab09 | | |
| 178 | GUGUCACUUCGAAGCGAAAUAUU | 3211 | HDAC6: 178U21 siNA sense stab09 | B GUCACUUCGAAGCGAAAUATT B | 3283 |
| 1540 | GGCUGGUCUAUGACCAAAAUAUG | 3212 | HDAC6: 1540U21 siNA sense | B CUGGUCUAUGACCAAAAUATT B | 3284 |
| | | | stab09 | | |
| 1773 | CACCGUGAGAGUUCCAACUUUGA | 3213 | HDAC6: 1773U21 siNA sense | B CCGUGAGAGUUCCAACUUUTT B | 3285 |
| | | | stab09 | | |
| 923 | CCGCUACGAGCAGGGUAGGUUCU | 3214 | HDAC6: 923U21 siNA sense stab09 | B GCUACGAGCAGGGUAGGUUTT B | 3286 |
| 596 | AGCAGACACCUACGACUCAGUUU | 3215 | HDAC6: 596U21 siNA sense stab09 | B CAGACACCUACGACUCAGUTT B | 3287 |
| 2688 | GAGCGGAUGACCACACGAGAAAA | 3216 | HDAC6: 2688U21 siNA sense | B GCGGAUGACCACACGAGAATT B | 3288 |
| | | | stab09 | | |
| 825 | AUCCGGAGGGUCCUUAUCGUAGA | 3209 | HDAC6: 843L21 siNA antisense | UACGAUAAGGACCCUCCGGTsT | 3289 |
| | | | (825C) stab10 | | |
| 3904 | AAGAGAACUGCGACGAUUAAUUG | 3210 | HDAC6: 3922L21 siNA antisense | AUUAAUCGUCGCAGUUCUCTsT | 3290 |
| | | | (3904C) stab10 | | |
| 178 | GUGUCACUUCGAAGCGAAAUAUU | 3211 | HDAC6: 196L21 sNA antisense | UAUUUCGCUUCGAAGUGACTsT | 3291 |
| | | | (178C) stab10 | | |
| 1540 | GGCUGGUCUAUGACCAAAAUAUG | 3212 | HDAC6: 1558L21 siNA antisense | UAUUUUGGUCAUAGACCAGTsT | 3292 |
| | | | (1540C) stab10 | | |
| 1773 | CACCGUGAGAGUUCCAACUUUGA | 3213 | HDAC6: 1791L21 siNA antisense | AAAGUUGGAACUCUCACGGTsT | 3293 |
| | | | (1773C) stab10 | | |
| 923 | CCGCUACGAGCAGGGUAGGUUCU | 3214 | HDAC6: 941L21 siNA antisense | AACCUACCCUGCUCGUAGCTsT | 3294 |
| | | | (923C) stab10 | | |
| 596 | AGCAGACACCUACGACUCAGUUU | 3215 | HDAC6: 614L21 siNA antisense | ACUGAGUCGUAGGUGUCUGTsT | 3295 |
| | | | (596C) stab10 | | |
| 2688 | GAGCGGAUGACCACACGAGAAAA | 3216 | HDAC6: 2706L21 siNA antisense | UUCUCGUGUGGUCAUCCGCTsT | 3296 |
| | | | (2688C) stab10 | | |
| 825 | AUCCGGAGGGUCCUUAUCGUAGA | 3209 | HDAC6: 843L21 siNA antisense | uAcGAuAAGGAcccuccGGTT B | 3297 |
| | | | (825C) stab19 | | |
| 3904 | AAGAGAACUGCGACGAUUAAUUG | 3210 | HDAC6: 3922L21 siNA antisense | AuuAAucGucGcAGuucucTT B | 3298 |
| | | | (3904C) stab19 | | |
| 178 | GUGUCACUUCGAAGCGAAAUAUU | 3211 | HDAC6: 196L21 siNA antisense | uAuuucGcuucGAAGuGAcTT B | 3299 |
| | | | (178C) stab19 | | |
| 1540 | GGCUGGUCUAUGACCAAAAUAUG | 3212 | HDAC6: 1558L21 siNA antisense | uAuuuuGGucAuAGAccAGTT B | 3300 |
| | | | (1540C) stab19 | | |
| 1773 | CACCGUGAGAGUUCCAACUUUGA | 3213 | HDAC6: 1791L21 siNA antisense | AAAGuuGGAAcucucAcGGTT B | 3301 |
| | | | (1773C) stab19 | | |
| 923 | CCGCUACGAGCAGGGUAGGUUCU | 3214 | HDAC6: 941L21 siNA antisense | AAccuAcccuGcucGuAGcTT B | 3302 |
| | | | (923C) stab19 | | |
| 596 | AGCAGACACCUACGACUCAGUUU | 3215 | HDAC6: 614L21 siNA antisense | AcuGAGucGuAGGuGucuGTT B | 3303 |
| | | | (596C) stab19 | | |
| 2688 | GAGCGGAUGACCACACGAGAAAA | 3216 | HDAC6: 2706L21 siNA antisense | uucucGuGuGGucAuccGcTT B | 3304 |
| | | | (2688C) stab19 | | |
| 825 | AUCCGGAGGGUCCUUAUCGUAGA | 3209 | HDAC6: 843L21 siNA antisense | UACGAUAAGGACCCUCCGGTT B | 3305 |
| | | | (825C) stab22 | | |
| 3904 | AAGAGAACUGCGACGAUUAAUUG | 3210 | HDAC6: 3922L21 siNA antisense | AUUAAUCGUCGCAGUUCUCTT B | 3306 |
| | | | (3904C) stab22 | | |
| 178 | GUGUCACUUCGAAGCGAAAUAUU | 3211 | HDAC6: 196L21 siNA antisense | UAUUUCGCUUCGAAGUGACTT B | 3307 |
| | | | (178C) stab22 | | |
| 1540 | GGCUGGUCUAUGACCAAAAUAUG | 3212 | HDAC6: 1558L21 siNA antisense | UAUUUUGGUCAUAGACCAGTT B | 3308 |
| | | | (1540C) stab22 | | |
| 1773 | CACCGUGAGAGUUCCAACUUUGA | 3213 | HDAC6: 1791L21 siNA antisense | AAAGUUGGAACUCUCACGGTT B | 3309 |
| | | | (1773C) stab22 | | |
| 923 | CCGCUACGAGCAGGGUAGGUUCU | 3214 | HDAC6: 941L21 siNA antisense | AACCUACCCUGCUCGUAGCTT B | 3310 |
| | | | (923C) stab22 | | |
| 596 | AGCAGACACCUACGACUCAGUUU | 3215 | HDAC6: 614L21 siNA antisense | ACUGAGUCGUAGGUGUCUGTT B | 3311 |
| | | | (596C) stab22 | | |
| 2688 | GAGCGGAUGACCACACGAGAAAA | 3216 | HDAC6: 2706L21 siNA antisense | UUCUCGUGUGGUCAUCCGCTT B | 3312 |
| | | | (2688C) stab22 | | |
| 825 | AUCCGGAGGGUCCUUAUCGUAGA | 3209 | HDAC6: 843L21 siNA antisense | UACGAuAAGGAcccuccGGTsT | 3313 |
| | | | (825C) stab25 | | |
| 3904 | AAGAGAACUGCGACGAUUAAUUG | 3210 | HDAC6: 3922L21 siNA antisense | AUUAAucGucGcAGuucucTsT | 3314 |
| | | | (3904C) stab25 | | |
| 178 | GUGUCACUUCGAAGCGAAAUAUU | 3211 | HDAC6: 196L21 siNA antisense | UAUuucGcuucGAAGuGAcTsT | 3315 |
| | | | (178C) stab25 | | |
| 1540 | GGCUGGUCUAUGACCAAAAUAUG | 3212 | HDAC6: 1558L21 siNA antisense | UAUuuuGGucAuAGAccAGTsT | 3316 |
| | | | (1540C) stab25 | | |
| 1773 | CACCGUGAGAGUUCCAACUUUGA | 3213 | HDAC6: 1791L21 siNA antisense | AAAGuuGGAAcucucAcGGTsT | 3317 |
| | | | (1773C) stab25 | | |
| 923 | CCGCUACGAGCAGGGUAGGUUCU | 3214 | HDAC6: 941L21 siNA antisense | AACcuAcccuGcucGuAGcTsT | 3318 |
| | | | (923C) stab25 | | |
| 596 | AGCAGACACCUACGACUCAGUUU | 3215 | HDAC6: 614L21 siNA antisense | ACUGAGucGuAGGuGucuGTsT | 3319 |
| | | | (596C) stab25 | | |
| 2688 | GAGCGGAUGACCACACGAGAAAA | 3216 | HDAC6: 2706L21 siNA antisense | UUCucGuGuGGucAuccGcTsT | 3320 |
| | | | (2688C) stab25 | | |

HDAC7

| | | | | | |
|---|---|---|---|---|---|
| 16 | UGCAGGACCACGACAGGAUUAAG | 3667 | HDAC7: 16U21 siNA sense | CAGGACCACGACAGGAUUATT | 3675 |
| 21 | GACCACGACAGGAUUAAGUGAGG | 3668 | HDAC7: 21U21 siNA sense | CCACGACAGGAUUAAGUGATT | 3676 |
| 370 | CACGCCGAUGCCCGAGUUGCAGG | 3669 | HDAC7: 370U21 siNA sense | CGCCGAUGCCCGAGUUGCATT | 3677 |
| 476 | CAGAAGCUAGCGGAGGUGAUUCU | 3670 | HDAC7: 476U21 siNA sense | GAAGCUAGCGGAGGUGAUUTT | 3678 |
| 511 | GGCGGCCCUAGAAAGAACAGUCC | 3671 | HDAC7: 511U21 siNA sense | CGGCCCUAGAAAGAACAGUTT | 3679 |
| 506 | CAGCAGGCGGCCCUAGAAAGAAC | 3672 | HDAC7: 506U21 siNA sense | GCAGGCGGCCCUAGAAAGATT | 3680 |
| 699 | UGCGCUAUAAGCCCAAGAAGUCC | 3673 | HDAC7: 699U21 siNA sense | CGCUAUAAGCCCAAGAAGUTT | 3681 |
| 1243 | AACUCACGUCCAGGUGAUCAAGA | 3674 | HDAC7: 1243U21 siNA sense | CUCACGUCCAGGUGAUCAATT | 3682 |
| 16 | UGCAGGACCACGACAGGAUUAAG | 3667 | HDAC7: 34L21 siNA antisense | UAAUCCUGUCGUGGUCCUGTT | 3683 |
| | | | (16C) | | |
| 21 | GACCACGACAGGAUUAAGUGAGG | 3668 | HDAC7: 39L21 siNA antisense | UCACUUAAUCCUGUCGUGGTT | 3684 |
| | | | (21C) | | |
| 370 | CACGCCGAUGCCCGAGUUGCAGG | 3669 | HDAC7: 388L21 siNA antisense | UGCAACUCGGGCAUCGGCGTT | 3685 |
| | | | (370C) | | |
| 476 | CAGAAGCUAGCGGAGGUGAUUCU | 3670 | HDAC7: 494L21 siNA antisense | AAUCACCUCCGCUAGCUUCTT | 3686 |
| | | | (476C) | | |
| 511 | GGCGGCCCUAGAAAGAACAGUCC | 3671 | HDAC7: 529L21 siNA antisense | ACUGUUCUUUCUAGGGCCGTT | 3687 |
| | | | (511C) | | |
| 506 | CAGCAGGCGGCCCUAGAAAGAAC | 3672 | HDAC7: 524L21 siNA antisense | UGUUUCUAGGGCCGCCUGCTT | 3688 |
| | | | (506C) | | |
| 699 | UGCGCUAUAAGCCCAAGAAGUCC | 3673 | HDAC7: 717L21 siNA antisense | ACUUCUUGGGCUUAUAGCGTT | 3689 |
| | | | (699C) | | |
| 1243 | AACUCACGUCCAGGUGAUCAAGA | 3674 | HDAC7: 1261L21 siNA antisense | UUGAUCACCUGGACGUGAGTT | 3690 |
| | | | (1243C) | | |
| 16 | UGCAGGACCACGACAGGAUUAAG | 3667 | HDAC7: 16U21 siNA sense stab04 | B cAGGAccAcGAcAGGAuuATT B | 3691 |
| 21 | GACCACGACAGGAUUAAGUGAGG | 3668 | HDAC7: 21U21 siNA sense stab04 | B ccAcGAcAGGAuuAAGuGATT B | 3692 |
| 370 | CACGCCGAUGCCCGAGUUGCAGG | 3669 | HDAC7: 370U21 siNA sense stab04 | B cGccGAuGcccGAGuuGcATT B | 3693 |
| 476 | CAGAAGCUAGCGGAGGUGAUUCU | 3670 | HDAC7: 476U21 siNA sense stab04 | B GAAGcuAGcGGAGGuGAuuTT B | 3694 |
| 511 | GGCGGCCCUAGAAAGAACAGUCC | 3671 | HDAC7: 511U21 siNA sense stab04 | B cGGcccuAGAAAGAAcAGuTT B | 3695 |
| 506 | CAGCAGGCGGCCCUAGAAAGAAC | 3672 | HDAC7: 506U21 siNA sense stab04 | B GcAGGcGGcccuAGAAAGATT B | 3696 |
| 699 | UGCGCUAUAAGCCCAAGAAGUCC | 3673 | HDAC7: 699U21 siNA sense stab04 | B cGcuAuAAGcccAAGAAGuTT B | 3697 |
| 1243 | AACUCACGUCCAGGUGAUCAAGA | 3674 | HDAC7: 1243U21 siNA sense | B cucAcGuccAGGuGAucAATT B | 3698 |
| | | | stab04 | | |
| 16 | UGCAGGACCACGACAGGAUUAAG | 3667 | HDAC7: 34L21 siNA antisense | uAAuccuGucGuGGuccuGTsT | 3699 |
| | | | (16C) stab05 | | |
| 21 | GACCACGACAGGAUUAAGUGAGG | 3668 | HDAC7: 39L21 siNA antisense | ucAcuuAAuccuGucGuGGTsT | 3700 |
| | | | (21C) stab05 | | |
| 370 | CACGCCGAUGCCCGAGUUGCAGG | 3669 | HDAC7: 388L21 siNA antisense | uGcAAcucGGGcAucGGcGTsT | 3701 |
| | | | (370C) stab05 | | |
| 476 | CAGAAGCUAGCGGAGGUGAUUCU | 3670 | HDAC7: 494L21 siNA antisense | AAucAccuccGcuAGcuucTsT | 3702 |
| | | | (476C) stab05 | | |
| 511 | GGCGGCCCUAGAAAGAACAGUCC | 3671 | HDAC7: 529L21 siNA antisense | AcuGuucuuucuAGGGccGTsT | 3703 |
| | | | (511C) stab05 | | |
| 506 | CAGCAGGCGGCCCUAGAAAGAAC | 3672 | HDAC7: 524L21 siNA antisense | ucuuucuAGGGccGccuGcTsT | 3704 |
| | | | (506C) stab05 | | |
| 699 | UGCGCUAUAAGCCCAAGAAGUCC | 3673 | HDAC7: 717L21 siNA antisense | AcuucuuGGGcuuAuAGcGTsT | 3705 |
| | | | (699C) stab05 | | |
| 1243 | AACUCACGUCCAGGUGAUCAAGA | 3674 | HDAC7: 1261L21 siNA antisense | uuGAucAccuGGAcGuGAGTsT | 3706 |
| | | | (1243C) stab05 | | |
| 16 | UGCAGGACCACGACAGGAUUAAG | 3667 | HDAC7: 16U21 siNA sense stab07 | B cAGGAccAcGAcAGGAuuATT B | 3707 |
| 21 | GACCACGACAGGAUUAAGUGAGG | 3668 | HDAC7: 21U21 siNA sense stab07 | B ccAcGAcAGGAuuAAGuGATT B | 3708 |
| 370 | CACGCCGAUGCCCGAGUUGCAGG | 3669 | HDAC7: 370U21 siNA sense stab07 | B cGccGAuGcccGAGuuGcATT B | 3709 |
| 476 | CAGAAGCUAGCGGAGGUGAUUCU | 3670 | HDAC7: 476U21 siNA sense stab07 | B GAAGcuAGcGGAGGuGAuuTT B | 3710 |
| 511 | GGCGGCCCUAGAAAGAACAGUCC | 3671 | HDAC7: 511U21 siNA sense stab07 | B cGGcccuAGAAAGAAcAGuTT B | 3711 |
| 506 | CAGCAGGCGGCCCUAGAAAGAAC | 3672 | HDAC7: 506U21 siNA sense stab07 | B GcAGGcGGcccuAGAAAGATT B | 3712 |
| 699 | UGCGCUAUAAGCCCAAGAAGUCC | 3673 | HDAC7: 699U21 siNA sense stab07 | B cGcuAuAAGcccAAGAAGuTT B | 3713 |
| 1243 | AACUCACGUCCAGGUGAUCAAGA | 3674 | HDAC7: 1243U21 siNA sense | B cucAcGuccAGGuGAucAATT B | 3714 |
| | | | stab07 | | |
| 16 | UGCAGGACCACGACAGGAUUAAG | 3667 | HDAC7: 34L21 siNA antisense | uAAuccuGucGuGGuccuGTsT | 3715 |
| | | | (16C) stab11 | | |
| 21 | GACCACGACAGGAUUAAGUGAGG | 3668 | HDAC7: 39L21 siNA antisense | ucAcuuAAuccuGucGuGGTsT | 3716 |
| | | | (21C) stab11 | | |
| 370 | CACGCCGAUGCCCGAGUUGCAGG | 3669 | HDAC7: 388L21 siNA antisense | uGcAAcucGGGcAucGGcGTsT | 3717 |
| | | | (370C) stab11 | | |
| 476 | CAGAAGCUAGCGGAGGUGAUUCU | 3670 | HDAC7: 494L21 siNA antisense | AAucAccuccGcuAGcuucTsT | 3718 |
| | | | (476C) stab11 | | |
| 511 | GGCGGCCCUAGAAAGAACAGUCC | 3671 | HDAC7: 529L21 siNA antisense | AcuGuucuuucuAGGGccGTsT | 3719 |
| | | | (511C) stab11 | | |
| 506 | CAGCAGGCGGCCCUAGAAAGAAC | 3672 | HDAC7: 524L21 siNA antisense | ucuuucuAGGGccGccuGcTsT | 3720 |
| | | | (506C) stab11 | | |
| 699 | UGCGCUAUAAGCCCAAGAAGUCC | 3673 | HDAC7: 717L21 siNA antisense | AcuucuuGGGcuuAuAGcGTsT | 3721 |
| | | | (699C) stab11 | | |
| 1243 | AACUCACGUCCAGGUGAUCAAGA | 3674 | HDAC7: 1261L21 siNA antisense | uuGAucAccuGGAcGuGAGTsT | 3722 |
| | | | (1243C) stab11 | | |
| 16 | UGCAGGACCACGACAGGAUUAAG | 3667 | HDAC7: 16U21 siNA sense stab18 | B cAGGAccAcGAcAGGAuuATT B | 3723 |
| 21 | GACCACGACAGGAUUAAGUGAGG | 3668 | HDAC7: 21U21 siNA sense stab18 | B ccAcGAcAGGAuuAAGuGATT B | 3724 |
| 370 | CACGCCGAUGCCCGAGUUGCAGG | 3669 | HDAC7: 370U21 siNA sense stab18 | B cGccGAuGcccGAGuuGcATT B | 3725 |
| 476 | CAGAAGCUAGCGGAGGUGAUUCU | 3670 | HDAC7: 476U21 siNA sense stab18 | B GAAGcuAGcGGAGGuGAuuTT B | 3726 |
| 511 | GGCGGCCCUAGAAAGAACAGUCC | 3671 | HDAC7: 511U21 siNA sense stab18 | B cGGcccuAGAAAGAAcAGuTT B | 3727 |
| 506 | CAGCAGGCGGCCCUAGAAAGAAC | 3672 | HDAC7: 506U21 siNA sense stab18 | B GcAGGcGGcccuAGAAAGATT B | 3728 |
| 699 | UGCGCUAUAAGCCCAAGAAGUCC | 3673 | HDAC7: 699U21 siNA sense stab18 | B cGcuAuAAGcccAAGAAGuTT B | 3729 |
| 1243 | AACUCACGUCCAGGUGAUCAAGA | 3674 | HDAC7: 1243U21 siNA sense | B cucAcGuccAGGuGAucAATT B | 3730 |
| | | | stab18 | | |
| 16 | UGCAGGACCACGACAGGAUUAAG | 3667 | HDAC7: 34L21 siNA antisense | uAAuccuGucGuGGuccuGTsT | 3731 |
| | | | (16C) stab08 | | |
| 21 | GACCACGACAGGAUUAAGUGAGG | 3668 | HDAC7: 39L21 siNA antisense | ucAcuuAAuccuGucGuGGTsT | 3732 |
| | | | (21C) stab08 | | |
| 370 | CACGCCGAUGCCCGAGUUGCAGG | 3669 | HDAC7: 388L21 siNA antisense | uGcAAcucGGGcAucGGcGTsT | 3733 |
| | | | (370C) stab08 | | |
| 476 | CAGAAGCUAGCGGAGGUGAUUCU | 3670 | HDAC7: 494L21 siNA antisense | AAucAccuccGcuAGcuucTsT | 3734 |
| | | | (476C) stab08 | | |
| 511 | GGCGGCCCUAGAAAGAACAGUCC | 3671 | HDAC7: 529L21 siNA antisense | AcuGuucuuucuAGGGccGTsT | 3735 |
| | | | (511C) stab08 | | |
| 506 | CAGCAGGCGGCCCUAGAAAGAAC | 3672 | HDAC7: 524L21 siNA antisense | ucuuucuAGGGccGccuGcTsT | 3736 |
| | | | (506C) stab08 | | |
| 699 | UGCGCUAUAAGCCCAAGAAGUCC | 3673 | HDAC7: 717L21 siNA antisense | AcuucuuGGGcuuAuAGcGTsT | 3737 |
| | | | (699C) stab08 | | |
| 1243 | AACUCACGUCCAGGUGAUCAAGA | 3674 | HDAC7: 1261L21 siNA antisense | uuGAucAccuGGAcGuGAGTsT | 3738 |
| | | | (1243C) stab08 | | |
| 16 | UGCAGGACCACGACAGGAUUAAG | 3667 | HDAC7: 16U21 siNA sense stab09 | B CAGGACCACGACAGGAUUATT B | 3739 |
| 21 | GACCACGACAGGAUUAAGUGAGG | 3668 | HDAC7: 21U21 siNA sense stab09 | B CCACGACAGGAUUAAGUGATT B | 3740 |
| 370 | CACGCCGAUGCCCGAGUUGCAGG | 3669 | HDAC7: 370U21 siNA sense stab09 | B CGCCGAUGCCCGAGUUGCATT B | 3741 |
| 476 | CAGAAGCUAGCGGAGGUGAUUCU | 3670 | HDAC7: 476U21 siNA sense stab09 | B GAAGCUAGCGGAGGUGAUUTT B | 3742 |
| 511 | GGCGGCCCUAGAAAGAACAGUCC | 3671 | HDAC7: 511U21 siNA sense stab09 | B CGGCCCUAGAAAGAACAGUTT B | 3743 |
| 506 | CAGCAGGCGGCCCUAGAAAGAAC | 3672 | HDAC7: 506U21 siNA sense stab09 | B GCAGGCGGCCCUAGAAAGATT B | 3744 |
| 699 | UGCGCUAUAAGCCCAAGAAGUCC | 3673 | HDAC7: 699U21 siNA sense stab09 | B CGCUAUAAGCCCAAGAAGUTT B | 3745 |
| 1243 | AACUCACGUCCAGGUGAUCAAGA | 3674 | HDAC7: 1243U21 siNA sense | B CUCACGUCCAGGUGAUCAATT B | 3746 |
| | | | stab09 | | |
| 16 | UGCAGGACCACGACAGGAUUAAG | 3667 | HDAC7: 34L21 siNA antisense | UAAUCCUGUCGUGGUCCUGTsT | 3747 |
| | | | (16C) stab10 | | |
| 21 | GACCACGACAGGAUUAAGUGAGG | 3668 | HDAC7: 39L21 siNA antisense | UCACUUAAUCCUGUCGUGGTsT | 3748 |
| | | | (21C) stab10 | | |
| 370 | CACGCCGAUGCCCGAGUUGCAGG | 3669 | HDAC7: 388L21 siNA antisense | UGCAACUCGGGCAUGGGCGTsT | 3749 |
| | | | (370C) stab 10 | | |
| 476 | CAGAAGCUAGCGGAGGUGAUUCU | 3670 | HDAC7: 494L21 siNA antisense | AAUCACCUCCGCUAGCUUCTsT | 3750 |
| | | | (476C) stab10 | | |
| 511 | GGCGGCCCUAGAAAGAACAGUCC | 3671 | HDAC7: 529L21 siNA antisense | ACUGUUCUUUCUAGGGCCGTsT | 3751 |
| | | | (511C) stab10 | | |
| 506 | CAGCAGGCGGCCCUAGAAAGAAC | 3672 | HDAC7: 524L21 siNA antisense | UCUUUCUAGGGCCGCCUGCTsT | 3752 |
| | | | (506C) stab10 | | |
| 699 | UGCGCUAUAAGCCCAAGAAGUCC | 3673 | HDAC7: 717L21 siNA antisense | ACUUCUUGGGCUUAUAGCGTsT | 3753 |
| | | | (699C) stab10 | | |
| 1243 | AACUCACGUCCAGGUGAUCAAGA | 3674 | HDAC7: 1261L21 siNA antisense | UUGAUCACCUGGACGUGAGTsT | 3754 |
| | | | (1243C) stab10 | | |
| 16 | UGCAGGACCACGACAGGAUUAAG | 3667 | HDAC7: 34L21 siNA antisense | uAAuccuGucGuGGuccuGTT B | 3755 |
| | | | (16C) stab19 | | |
| 21 | GACCACGACAGGAUUAAGUGAGG | 3668 | HDAC7: 39L21 siNA antisense | ucAcuuAAuccuGucGuGGTT B | 3756 |
| | | | (21C) stab19 | | |
| 370 | CACGCCGAUGCCCGAGUUGCAGG | 3669 | HDAC7: 388L21 siNA antisense | uGcAAcucGGGcAucGGcGTT B | 3757 |
| | | | (370C) stab19 | | |
| 476 | CAGAAGCUAGCGGAGGUGAUUCU | 3670 | HDAC7: 494L21 siNA antisense | AAucAccuccGcuAGcuucTT B | 3758 |
| | | | (476C) stab19 | | |
| 511 | GGCGGCCCUAGAAAGAACAGUCC | 3671 | HDAC7: 529L21 siNA antisense | AcuGuucuuucuAGGGccGTT B | 3759 |
| | | | (511C) stab19 | | |
| 506 | CAGCAGGCGGCCCUAGAAAGAAC | 3672 | HDAC7: 524L21 siNA antisense | ucuuucuAGGGccGccuGcTT B | 3760 |
| | | | (506C) stab19 | | |
| 699 | UGCGCUAUAAGCCCAAGAAGUCC | 3673 | HDAC7: 717L21 siNA antisense | AcuucuuGGGcuuAuAGcGTT B | 3761 |
| | | | (699C) stab19 | | |
| 1243 | AACUCACGUCCAGGUGAUCAAGA | 3674 | HDAC7: 1261L21 siNA antisense | uuGAucAccuGGAcGuGAGTT B | 3762 |
| | | | (1243C) stab19 | | |
| 16 | UGCAGGACCACGACAGGAUUAAG | 3667 | HDAC7: 34L21 siNA antisense | UAAUCCUGUCGUGGUCCUGTT B | 3763 |
| | | | (16C) stab22 | | |
| 21 | GACCACGACAGGAUUAAGUGAGG | 3668 | HDAC7: 39L21 siNA antisense | UCACUUAAUCCUGUCGUGGTT B | 3764 |
| | | | (21C) stab22 | | |
| 370 | CACGCCGAUGCCCGAGUUGCAGG | 3669 | HDAC7: 388L21 siNA antisense | UGCAACUCGGGCAUCGGCGTT B | 3765 |
| | | | (370C) stab22 | | |
| 476 | CAGAAGCUAGCGGAGGUGAUUCU | 3670 | HDAC7: 494L21 siNA antisense | AAUCACCUCCGCUAGCUUCTT B | 3766 |
| | | | (476C) stab22 | | |
| 511 | GGCGGCCCUAGAAAGAACAGUCC | 3671 | HDAC7: 529L21 siNA antisense | ACUGUUCUUUCUAGGGCCGTT B | 3767 |
| | | | (511C) stab22 | | |
| 506 | CAGCAGGCGGCCCUAGAAAGAAC | 3672 | HDAC7: 524L21 siNA antisense | UCUUUCUAGGGCCGCCUGCTT B | 3768 |
| | | | (506C) stab22 | | |
| 699 | UGCGCUAUAAGCCCAAGAAGUCC | 3673 | HDAC7: 717L21 siNA antisense | ACUUCUUGGGGUUAUAGCGTT B | 3769 |
| | | | (699C) stab22 | | |
| 1243 | AACUCACGUCCAGGUGAUCAAGA | 3674 | HDAC7: 1261L21 siNA antisense | UUGAUCACCUGGACGUGAGTT B | 3770 |
| | | | (1243C) stab22 | | |
| 16 | UGCAGGACCACGACAGGAUUAAG | 3667 | HDAC7: 34L21 siNA antisense | UAAuccuGucGuGGuccuGTsT | 3771 |
| | | | (16C) stab25 | | |
| 21 | GACCACGACAGGAUUAAGUGAGG | 3668 | HDAC7: 39L21 siNA antisense | UCAcuuAAuccuGucGuGGTsT | 3772 |
| | | | (21C) stab25 | | |
| 370 | CACGCCGAUGCCCGAGUUGCAGG | 3669 | HDAC7: 388L21 siNA antisense | UGCAAcucGGGcAucGGcGTsT | 3773 |
| | | | (370C) stab25 | | |
| 476 | CAGAAGCUAGCGGAGGUGAUUCU | 3670 | HDAC7: 494L21 siNA antisense | AAUcAccuccGcuAGcuucTsT | 3774 |
| | | | (476C) stab25 | | |
| 511 | GGCGGCCCUAGAAAGAACAGUCC | 3671 | HDAC7: 529L21 siNA antisense | ACUGuucuuucuAGGGccGTsT | 3775 |
| | | | (511C) stab25 | | |
| 506 | CAGCAGGCGGCCCUAGAAAGAAC | 3672 | HDAC7: 524L21 siNA | UCUuucuAGGGccGccuGcTsT | 3776 |
| | | | (506C) stab25 | | |
| 699 | UGCGCUAUAAGCCCAAGAAGUCC | 3673 | HDAC7: 717L21 siNA antisense | ACUucuuGGGcuuAuAGcGTsT | 3777 |
| | | | (699C) stab25 | | |
| 1243 | AACUCACGUCCAGGUGAUCAAGA | 3674 | HDAC7: 1261L21 siNA antisense | UUGAucAccuGGAcGuGAGTsT | 3778 |
| | | | (1243C) stab25 | | |

HDAC8

| | | | | | |
|---|---|---|---|---|---|
| 84 | CUGGUCCCGGUUUAUAUCUAUAG | 3971 | HDAC8: 84U21 siNA sense | GGUCCCGGUUUAUAUCUAUTT | 3979 |
| 889 | UGGGAAUUGGCAAGUGUCUUAAG | 3972 | HDAC8: 889U21 siNA sense | GGAAUUGGCAAGUGUCUUATT | 3980 |
| 418 | GCCUGAUUGACGGAAUGUGCAAA | 3973 | HDAC8: 418U21 siNA sense | CUGAUUGACGGAAUGUGCATT | 3981 |
| 426 | GACGGAAUGUGCAAAGUAGCAAU | 3974 | HDAC8: 426U21 siNA sense | CGGAAUGUGCAAAGUAGCATT | 3982 |
| 923 | AUGGCAGUUGGCAACACUCAUUU | 3975 | HDAC8: 923U21 siNA sense | GGCAGUUGGCAACACUCAUTT | 3983 |
| 533 | ACGAUUGCGACGGAAAUUUGAGC | 3976 | HDAC8: 533U21 siNA sense | GAUUGCGACGGAAAUUUGATT | 3984 |
| 542 | ACGGAAAUUUGAGCGUAUUCUCU | 3977 | HDAC8: 542U21 siNA sense | GGAAAUUUGAGCGUAUUCUTT | 3985 |
| 554 | GCGUAUUCUCUACGUGGAUUUGG | 3978 | HDAC8: 554U21 siNA sense | GUAUUCUCUACGUGGAUUUTT | 3986 |
| 84 | CUGGUCCCGGUUUAUAUCUAUAG | 3971 | HDAC8: 102L21 siNA antisense | AUAGAUAUAAACCGGGACCTT | 3987 |
| | | | (84C) | | |
| 889 | UGGGAAUUGGCAAGUGUCUUAAG | 3972 | HDAC8: 907L21 siNA antisense | UAAGACACUUGCCAAUUCCTT | 3988 |
| | | | (889C) | | |
| 418 | GCCUGAUUGACGGAAUGUGCAAA | 3973 | HDAC8: 436L21 siNA antisense | UGCACAUUCCGUCAAUCAGTT | 3989 |
| | | | (418C) | | |
| 426 | GACGGAAUGUGCAAAGUAGCAAU | 3974 | HDAC8: 444L21 siNA antisense | UGCUACUUUGCACAUUCCGTT | 3990 |
| | | | (426C) | | |
| 923 | AUGGCAGUUGGCAACACUCAUUU | 3975 | HDAC8: 941L21 siNA antisense | AUGAGUGUUGCCAACUGCCTT | 3991 |
| | | | (923C) | | |
| 533 | ACGAUUGCGACGGAAAUUUGAGC | 3976 | HDAC8: 551L21 siNA antisense | UCAAAUUUCCGUCGCAAUCTT | 3992 |
| | | | (533C) | | |
| 542 | ACGGAAAUUUGAGCGUAUUCUCU | 3977 | HDAC8: 560L21 siNA antisense | AGAAUACGCUCAAAUUUCCTT | 3993 |
| | | | (542C) | | |
| 554 | GCGUAUUCUCUACGUGGAUUUGG | 3978 | HDAC8: 572L21 siNA antisense | AAAUCCACGUAGAGAAUACTT | 3994 |
| | | | (554C) | | |
| 84 | CUGGUCCCGGUUUAUAUCUAUAG | 3971 | HDAC8: 84U21 siNA sense stab04 | B GGucccGGuuuAuAucuAuTT B | 3995 |
| 889 | UGGGAAUUGGCAAGUGUCUUAAG | 3972 | HDAC8: 889U21 siNA sense stab04 | B GGAAuuGGcAAGuGucuuATT B | 3996 |
| 418 | GCCUGAUUGACGGAAUGUGCAAA | 3973 | HDAC8: 418U21 siNA sense stab04 | B cuGAuuGAcGGAAuGuGcATT B | 3997 |
| 426 | GACGGAAUGUGCAAAGUAGCAAU | 3974 | HDAC8: 426U21 siNA sense stab04 | B cGGAAuGuGcAAAGuAGcATT B | 3998 |
| 923 | AUGGCAGUUGGCAACACUCAUUU | 3975 | HDAC8: 923U21 siNA sense stab04 | B GGcAGuuGGcAAcAcucAuTT B | 3999 |
| 533 | ACGAUUGCGACGGAAAUUUGAGC | 3976 | HDAC8: 533U21 siNA sense stab04 | B GAuuGcGAcGGAAAuuuGATT B | 4000 |
| 542 | ACGGAAAUUUGAGCGUAUUCUCU | 3977 | HDAC8: 542U21 siNA sense stab04 | B GGAAAuuuGAGcGuAuucuTT B | 4001 |
| 554 | GCGUAUUCUCUACGUGGAUUUGG | 3978 | HDAC8: 554U21 siNA sense stab04 | B GuAuucucuAcGuGGAuuuTT B | 4002 |
| 84 | CUGGUCCCGGUUUAUAUCUAUAG | 3971 | HDAC8: 102L21 siNA antisense | AuAGAuAuAAAccGGGAccTsT | 4003 |
| | | | (84C) stab05 | | |
| 889 | UGGGAAUUGGCAAGUGUCUUAAG | 3972 | HDAC8: 907L21 siNA antisense | uAAGAcAcuuGccAAuuccTsT | 4004 |
| | | | (889C) stab05 | | |
| 418 | GCCUGAUUGACGGAAUGUGCAAA | 3973 | HDAC8: 436L21 siNA antisense | uGcAcAuuccGucAAucAGTsT | 4005 |
| | | | (418C) stab05 | | |
| 426 | GACGGAAUGUGCAAAGUAGCAAU | 3974 | HDAC8: 444L21 siNA antisense | uGcuAcuuuGcAcAuuccGTsT | 4006 |
| | | | (426C) stab05 | | |
| 923 | AUGGCAGUUGGCAACACUCAUUU | 3975 | HDAC8: 941L21 siNA antisense | AuGAGuGuuGccAAcuGccTsT | 4007 |
| | | | (923C) stab05 | | |
| 533 | ACGAUUGCGACGGAAAUUUGAGC | 3976 | HDAC8: 551L21 siNA antisense | ucAAAuuuccGucGcAAucTsT | 4008 |
| | | | (533C) stab05 | | |
| 542 | ACGGAAAUUUGAGCGUAUUCUCU | 3977 | HDAC8: 560L21 siNA antisense | AGAAuAcGcucAAAuuuccTsT | 4009 |
| | | | (542C) stab05 | | |
| 554 | GCGUAUUCUCUACGUGGAUUUGG | 3978 | HDAC8: 572L21 siNA antisense | AAAuccAcGuAGAGAAuAcTsT | 4010 |
| | | | (554C) stab05 | | |
| 84 | CUGGUCCCGGUUUAUAUCUAUAG | 3971 | HDAC8: 84U21 siNA sense stab07 | B GGucccGGuuuAuAucuAuTT B | 4011 |
| 889 | UGGGAAUUGGCAAGUGUCUUAAG | 3972 | HDAC8: 889U21 siNA sense stab07 | B GGAAuuGGcAAGuGucuuATT B | 4012 |
| 418 | GCCUGAUUGACGGAAUGUGCAAA | 3973 | HDAC8: 418U21 siNA sense stab07 | B cuGAuuGAcGGAAuGuGcATT B | 4013 |
| 426 | GACGGAAUGUGCAAAGUAGCAAU | 3974 | HDAC8: 426U21 siNA sense stab07 | B cGGAAuGuGcAAAGuAGcATT B | 4014 |
| 923 | AUGGCAGUUGGCAACACUCAUUU | 3975 | HDAC8: 923U21 siNA sense stab07 | B GGcAGuuGGcAAcAcucAuTT B | 4015 |
| 533 | ACGAUUGCGACGGAAAUUUGAGC | 3976 | HDAC8: 533U21 siNA sense stab07 | B GAuuGcGAcGGAAAuuuGATT B | 4016 |
| 542 | ACGGAAAUUUGAGCGUAUUCUCU | 3977 | HDAC8: 542U21 siNA sense stab07 | B GGAAAuuuGAGcGuAuucuTT B | 4017 |
| 554 | GCGUAUUCUCUACGUGGAUUUGG | 3978 | HDAC8: 554U21 siNA sense stab07 | B GuAuucucuAcGuGGAuuuTT B | 4018 |
| 84 | CUGGUCCCGGUUUAUAUCUAUAG | 3971 | HDAC8: 102L21 siNA antisense | AuAGAuAuAAAccGGGAccTsT | 4019 |
| | | | (84C) stab11 | | |
| 889 | UGGGAAUUGGCAAGUGUCUUAAG | 3972 | HDAC8: 907L21 siNA antisense | uAAGAcAcuuGccAAuuccTsT | 4020 |
| | | | (889C) stab11 | | |
| 418 | GCCUGAUUGACGGAAUGUGCAAA | 3973 | HDAC8: 436L21 siNA antisense | uGcAcAuuccGucAAucAGTsT | 4021 |
| | | | (418C) stab11 | | |
| 426 | GACGGAAUGUGCAAAGUAGCAAU | 3974 | HDAC8: 444L21 siNA antisense | uGcuAcuuuGcAcAuuccGTsT | 4022 |
| | | | (426C) stab11 | | |
| 923 | AUGGCAGUUGGCAACACUCAUUU | 3975 | HDAC8: 941L21 siNA antisense | AuGAGuGuuGccAAcuGccTsT | 4023 |
| | | | (923C) stab11 | | |
| 533 | ACGAUUGCGACGGAAAUUUGAGC | 3976 | HDAC8: 551L21 siNA antisense | ucAAAuuuccGucGcAAucTsT | 4024 |
| | | | (533C) stab11 | | |
| 542 | ACGGAAAUUUGAGCGUAUUCUCU | 3977 | HDAC8: 560L21 siNA antisense | AGAAuAcGcucAAAuuuccTsT | 4025 |
| | | | (542C) stab11 | | |
| 554 | GCGUAUUCUCUACGUGGAUUUGG | 3978 | HDAC8: 572L21 siNA antisense | AAAuccAcGuAGAGAAuAcTsT | 4026 |
| | | | (554C) stab11 | | |
| 84 | CUGGUCCCGGUUUAUAUCUAUAG | 3971 | HDAC8: 84U21 siNA sense stab18 | B GGucccGGuuuAuAucuAuTT B | 4027 |
| 889 | UGGGAAUUGGCAAGUGUCUUAAG | 3972 | HDAC8: 889U21 siNA sense stab18 | B GGAAuuGGcAAGuGucuuATT B | 4028 |
| 418 | GCCUGAUUGACGGAAUGUGCAAA | 3973 | HDAC8: 418U21 siNA sense stab18 | B cuGAuuGAcGGAAuGuGcATT B | 4029 |
| 426 | GACGGAAUGUGCAAAGUAGCAAU | 3974 | HDAC8: 426U21 siNA sense stab18 | B cGGAAuGuGcAAAGuAGcATT B | 4030 |
| 923 | AUGGCAGUUGGCAACACUCAUUU | 3975 | HDAC8: 923U21 siNA sense stab18 | B GGcAGuuGGcAAcAcucAuTT B | 4031 |
| 533 | ACGAUUGCGACGGAAAUUUGAGC | 3978 | HDAC8: 533U21 siNA sense stab18 | B GAuuGcGAcGGAAAuuuGATT B | 4032 |
| 542 | ACGGAAAUUUGAGCGUAUUCUCU | 3977 | HDAC8: 542U21 siNA sense stab18 | B GGAAAuuuGAGcGuAuucuTT B | 4033 |
| 554 | GCGUAUUCUCUACGUGGAUUUGG | 3978 | HDAC8: 554U21 siNA sense stab18 | B GuAuucucuAcGuGGAuuuTT B | 4034 |
| 84 | CUGGUCCCGGUUUAUAUCUAUAG | 3971 | HDAC8: 102L21 siNA antisense | AuAGAuAuAAAccGGGAccTsT | 4035 |
| | | | (84C) stab08 | | |
| 889 | UGGGAAUUGGCAAGUGUCUUAAG | 3972 | HDAC8: 907L21 siNA antisense | uAAGAcAcuuGccAAuuccTsT | 4036 |
| | | | (889C) stab08 | | |
| 418 | GCCUGAUUGACGGAAUGUGCAAA | 3973 | HDAC8: 436L21 siNA antisense | uGcAcAuuccGucAAucAGTsT | 4037 |
| | | | (418C) stab08 | | |
| 426 | GACGGAAUGUGCAAAGUAGCAAU | 3974 | HDAC8: 444L21 siNA antisense | uGcuAcuuuGcAcAuuccGTsT | 4038 |
| | | | (426C) stab08 | | |
| 923 | AUGGCAGUUGGCAACACUCAUUU | 3975 | HDAC8: 941L21 siNA antisense | AuGAGuGuuGccAAcuGccTsT | 4039 |
| | | | (923C) stab08 | | |
| 533 | ACGAUUGCGACGGAAAUUUGAGC | 3976 | HDAC8: 551L21 siNA antisense | ucAAAuuuccGucGcAAucTsT | 4040 |
| | | | (533C) stab08 | | |
| 542 | ACGGAAAUUUGAGCGUAUUCUCU | 3977 | HDAC8: 560L21 siNA antisense | AGAAuAcGcucAAAuuuccTsT | 4041 |
| | | | (542C) stab08 | | |
| 554 | GCGUAUUCUCUACGUGGAUUUGG | 3978 | HDAC8: 572L21 siNA antisense | AAAuccAcGuAGAGAAuAcTsT | 4042 |
| | | | (554C) stab08 | | |
| 84 | CUGGUCCCGGUUUAUAUCUAUAG | 3971 | HDAC8: 84U21 siNA sense stab09 | B GGUCCCGGUUUAUAUCUAUTT B | 4043 |
| 889 | UGGGAAUUGGCAAGUGUCUUAAG | 3972 | HDAC8: 889U21 siNA sense stab09 | B GGAAUUGGCAAGUGUCUUATT B | 4044 |
| 418 | GCCUGAUUGACGGAAUGUGCAAA | 3973 | HDAC8: 418U21 siNA sense stab09 | B CUGAUUGACGGAAUGUGCATT B | 4045 |
| 426 | GACGGAAUGUGCAAAGUAGCAAU | 3974 | HDAC8: 426U21 siNA sense stab09 | B CGGAAUGUGCAAAGUAGCATT B | 4046 |
| 923 | AUGGCAGUUGGCAACACUCAUUU | 3975 | HDAC8: 923U21 siNA sense stab09 | B GGCAGUUGGCAACACUCAUTT B | 4047 |
| 533 | ACGAUUGCGACGGAAAUUUGAGC | 3976 | HDAC8: 533U21 siNA sense stab09 | B GAUUGCGACGGAAAUUUGATT B | 4048 |
| 542 | ACGGAAAUUUGAGCGUAUUCUCU | 3977 | HDAC8: 542U21 siNA sense stab09 | B GGAAAUUUGAGCGUAUUCUTT B | 4049 |
| 554 | GCGUAUUCUCUACGUGGAUUUGG | 3978 | HDAC8: 554U21 siNA sense stabo9 | B GUAUUCUCUACGUGGAUUUTT B | 4050 |
| 84 | CUGGUCCCGGUUUAUAUCUAUAG | 3971 | HDAC8: 102L21 siNA antisense | AUAGAUAUAAACCGGGACCTsT | 4051 |
| | | | (84C) stab10 | | |
| 889 | UGGGAAUUGGCAAGUGUCUUAAG | 3972 | HDAC8: 907L21 siNA antisense | UAAGACACUUGCCAAUUCCTsT | 4052 |
| | | | (889C) stab10 | | |
| 418 | GCCUGAUUGACGGAAUGUGCAAA | 3973 | HDAC8: 436L21 siNA antisense | UGCACAUUCCGUCAAUCAGTsT | 4053 |
| | | | (418C) stab10 | | |
| 426 | GACGGAAUGUGCAAAGUAGCAAU | 3974 | HDAC8: 444L21 siNA antisense | UGCUACUUUGCACAUUCCGTsT | 4054 |
| | | | (426C) stab10 | | |
| 923 | AUGGCAGUUGGCAACACUCAUUU | 3975 | HDAC8: 941L21 siNA antisense | AUGAGUGUUGCCAACUGCCTsT | 4055 |
| | | | (923C) stab10 | | |
| 533 | ACGAUUGCGACGGAAAUUUGAGC | 3976 | HDAC8: 551L21 siNA antisense | UCAAAUUUCCGUCGCAAUCTsT | 4056 |
| | | | (533C) stab10 | | |
| 542 | ACGGAAAUUUGAGCGUAUUCUCU | 3977 | HDAC8: 560L21 siNA antisense | AGAAUACGCUCAAAUUUCCTsT | 4057 |
| | | | (542C) stab10 | | |
| 554 | GCGUAUUCUCUACGUGGAUUUGG | 3978 | HDAC8: 572L21 siNA antisense | AAAUCCACGUAGAGAAUACTsT | 4058 |
| | | | (554C) stab10 | | |
| 84 | CUGGUCCCGGUUUAUAUCUAUAG | 3971 | HDAC8: 102L21 siNA antisense | AuAGAuAuAAAccGGGAccTT B | 4059 |
| | | | (84C) stab19 | | |
| 889 | UGGGAAUUGGCAAGUGUCUUAAG | 3972 | HDAC8: 907L21 siNA antisense | uAAGAcAcuuGccAAuuccTT B | 4060 |
| | | | (889C) stab19 | | |
| 418 | GCCUGAUUGACGGAAUGUGCAAA | 3973 | HDAC8: 436L21 siNA antisense | uGcAcAuuccGucAAucAGTT B | 4061 |
| | | | (418C) stab19 | | |
| 426 | GACGGAAUGUGCAAAGUAGCAAU | 3974 | HDAC8: 444L21 siNA antisense | uGcuAcuuuGcAcAuuccGTT B | 4062 |
| | | | (426C) stab19 | | |
| 923 | AUGGCAGUUGGCAACACUCAUUU | 3975 | HDAC8: 941L21 siNA antisense | AuGAGuGuuGccAAcuGccTT B | 4063 |
| | | | (923C) stab19 | | |
| 533 | ACGAUUGCGACGGAAAUUUGAGC | 3976 | HDAC8: 551L21 siNA antisense | ucAAAuuuccGucGcAAucTT B | 4064 |
| | | | (533C) stab19 | | |
| 542 | ACGGAAAUUUGAGCGUAUUCUCU | 3977 | HDAC8: 560L21 siNA antisense | AGAAuAcGcucAAAuuuccTT B | 4065 |
| | | | (542C) stab19 | | |
| 554 | GCGUAUUCUCUACGUGGAUUUGG | 3978 | HDAC8: 572L21 siNA antisense | AAAuccAcGuAGAGAAuAcTT B | 4066 |
| | | | (554C) stab19 | | |
| 84 | CUGGUCCCGGUUUAUAUCUAUAG | 3971 | HDAC8: 102L21 siNA antisense | AUAGAUAUAAACCGGGACCTT B | 4067 |
| | | | (84C) stab22 | | |
| 889 | UGGGAAUUGGCAAGUGUCUUAAG | 3972 | HDAC8: 907L21 siNA antisense | UAAGACACUUGCCAAUUCCTT B | 4068 |
| | | | (889C) stab22 | | |
| 418 | GCCUGAUUGACGGAAUGUGCAAA | 3973 | HDAC8: 436L21 siNA antisense | UGCACAUUCCGUCAAUCAGTT B | 4069 |
| | | | (418C) stab22 | | |
| 426 | GACGGAAUGUGCAAAGUAGCAAU | 3974 | HDAC8: 444L21 siNA antisense | UGCUACUUUGCACAUUCCGTT B | 4070 |
| | | | (426C) stab22 | | |
| 923 | AUGGCAGUUGGCAACACUCAUUU | 3975 | HDAC8: 941L21 siNA antisense | AUGAGUGUUGCCAACUGCCTT B | 4071 |
| | | | (923C) stab22 | | |
| 533 | ACGAUUGCGACGGAAAUUUGAGC | 3976 | HDAC8: 551L21 siNA antisense | UCAAAUUUCCGUCGCAAUCTT B | 4072 |
| | | | (533C) stab22 | | |
| 542 | ACGGAAAUUUGAGCGUAUUCUCU | 3977 | HDAC8: 560L21 siNA antisense | AGAAUACGCUCAAAUUUCCTT B | 4073 |
| | | | (542C) stab22 | | |
| 554 | GCGUAUUCUCUACGUGGAUUUGG | 3978 | HDAC8: 572L21 siNA antisense | AAAUCCACGUAGAGAAUACTT B | 4074 |
| | | | (554C) stab22 | | |
| 84 | CUGGUCCCGGUUUAUAUCUAUAG | 3971 | HDAC8: 102L21 siNA antisense | AUAGAuAuAAAccGGGAccTsT | 4075 |
| | | | (84C) stab25 | | |
| 889 | UGGGAAUUGGCAAGUGUCUUAAG | 3972 | HDAC8: 907L21 siNA antisense | UAAGAcAcuuGccAAuuccTsT | 4076 |
| | | | (889C) stab25 | | |
| 418 | GCCUGAUUGACGGAAUGUGCAAA | 3973 | HDAC8: 436L21 siNA antisense | UGCAcAuuccGucAAucAGTsT | 4077 |
| | | | (418C) stab25 | | |
| 426 | GACGGAAUGUGCAAAGUAGCAAU | 3974 | HDAC8: 444L21 siNA antisense | UGCuAcuuuGcAcAuuccGTsT | 4078 |
| | | | (426C) stab25 | | |
| 923 | AUGGCAGUUGGCAACACUCAUUU | 3975 | HDAC8: 941L21 siNA antisense | AUGAGuGuuGccAAcuGccTsT | 4079 |
| | | | (923C) stab25 | | |
| 533 | ACGAUUGCGACGGAAAUUUGAGC | 3976 | HDAC8: 551L21 siNA antisense | UCAAAuuuccGucGcAAucTsT | 4080 |
| | | | (533C) stab25 | | |
| 542 | ACGGAAAUUUGAGCGUAUUCUCU | 3977 | HDAC8: 560L21 siNA antisense | AGAAuAcGcucAAAuuuccTsT | 4081 |
| | | | (542C) stab25 | | |
| 554 | GCGUAUUCUCUACGUGGAUUUGG | 3978 | HDAC8: 572L21 siNA antisense | AAAuccAcGuAGAGAAuAcTsT | 4082 |
| | | | (554C) stab25 | | |

HDAC9

| | | | | | |
|---|---|---|---|---|---|
| 3108 | CACCAAAGCCCGAAUAUGAAUGC | 4599 | HDAC9v4: 3108U21 siNA sense | CCAAAGCCCGAAUAUGAAUTT | 4607 |
| 3548 | AACGUAACCGCUGUGAUUCUAGA | 4600 | HDAC9v4: 3548U21 siNA sense | CGUAACCGCUGUGAUUCUATT | 4608 |
| 3573 | UACAGUAAACCACGAUUGGAAGA | 4601 | HDAC9v4: 3573U21 siNA sense | CAGUAAACCACGAUUGGAATT | 4609 |
| 3822 | UAGCUAUGAACGGAUCGUAAUUC | 4602 | HDAC9v4: 3822U21 siNA sense | GCUAUGAACGGAUCGUAAUTT | 4610 |
| 987 | AACAAUGGGCCAACUGGAAGUGU | 4603 | HDAC9v4: 987U21 siNA sense | CAAUGGGCCAACUGGAAGUTT | 4611 |
| 2292 | CCCAGGAUACUCCUAGGUGAUGA | 4604 | HDAC9v4: 2292U21 siNA sense | CAGGAUACUCCUAGGUGAUTT | 4612 |
| 2294 | CAGGAUACUCCUAGGUGAUGACU | 4605 | HDAC9v4: 2294U21 siNA sense | GGAUACUCCUAGGUGAUGATT | 4613 |
| 3114 | AGCCCGAAUAUGAAUGCUGUUAU | 4606 | HDAC9v4: 3114U21 siNA sense | CCCGAAUAUGAAUGCUGUUTT | 4614 |
| 3108 | CACCAAAGCCCGAAUAUGAAUGC | 4599 | HDAC9v4: 3126L21 siNA antisense | AUUCAUAUUCGGGCUUUGGTT | 4615 |
| | | | (3108C) | | |
| 3548 | AACGUAACCGCUGUGAUUCUAGA | 4600 | HDAC9v4: 3566L21 siNA antisense | UAGAAUCACAGCGGUUACGTT | 4616 |
| | | | (3548C) | | |
| 3573 | UACAGUAAACCACGAUUGGAAGA | 4601 | HDAC9v4: 3591L21 siNA antisense | UUCCAAUCGUGGUUUACUGTT | 4617 |
| | | | (3573C) | | |
| 3822 | UAGCUAUGAACGGAUCGUAAUUC | 4602 | HDAC9v4: 3840L21 siNA antisense | AUUACGAUCGGUUCAUAGCTT | 4618 |
| | | | (3822C) | | |
| 987 | AACAAUGGGCCAACUGGAAGUGU | 4603 | HDAC9v4: 1005L21 siNA antisense | ACUUCCAGUUGGCCCAUUGTT | 4619 |
| | | | (987C) | | |
| 2292 | CCCAGGAUACUCCUAGGUGAUGA | 4604 | HDAC9v4: 2310L21 siNA antisense | AUCACCUAGGAGUAUCCUGTT | 4620 |
| | | | (2292C) | | |
| 2294 | CAGGAUACUCCUAGGUGAUGACU | 4605 | HDAC9v4: 2312L21 siNA antisense | UCAUCACCUAGGAGUAUCCTT | 4621 |
| | | | (2294C) | | |
| 3114 | AGCCCGAAUAUGAAUGCUGUUAU | 4606 | HDAC9v4: 3132L21 siNA antisense | AACAGCAUUCAUAUUCGGGTT | 4622 |
| | | | (3114C) | | |
| 3108 | CACCAAAGCCCGAAUAUGAAUGC | 4599 | HDAC9v4: 3108U21 siNA sense | B ccAAAGcccGAAuAuGAAuTT B | 4623 |
| | | | stab04 | | |
| 3548 | AACGUAACCGCUGUGAUUCUAGA | 4600 | HDAC9v4: 3548U21 siNA sense | B cGuAAccGcuGuGAuucuATT B | 4624 |
| | | | stab04 | | |
| 3573 | UACAGUAAACCACGAUUGGAAGA | 4601 | HDAC9v4: 3573U21 siNA sense | B cAGuAAAccAcGAuuGGAATT B | 4625 |
| | | | stab04 | | |
| 3822 | UAGCUAUGAACGGAUCGUAAUUC | 4602 | HDAC9v4: 3822U21 siNA sense | B GcuAuGAAcGGAucGuAAuTT B | 4626 |
| | | | stab04 | | |
| 987 | AACAAUGGGCCAACUGGAAGUGU | 4603 | HDAC9v4: 987U21 siNA sense | B cAAuGGGccAAcuGGAAGuTT B | 4627 |
| | | | stab04 | | |
| 2292 | CCCAGGAUACUCCUAGGUGAUGA | 4604 | HDAC9v4: 2292U21 siNA sense | B cAGGAuAcuccuAGGuGAuTT B | 4628 |
| | | | stab04 | | |
| 2294 | CAGGAUACUCCUAGGUGAUGACU | 4605 | HDAC9v4: 2294U21 siNA sense | B GGAuAcuccuAGGuGAuGATT B | 4629 |
| | | | stab04 | | |
| 3114 | AGCCCGAAUAUGAAUGGUGUUAU | 4606 | HDAC9v4: 3114U21 siNA sense | B cccGAAuAuGAAuGcuGuuTT B | 4630 |
| | | | stab04 | | |
| 3108 | CACCAAAGCCCGAAUAUGAAUGC | 4599 | HDAC9v4: 3126L21 siNA antisense | AuucAuAuucGGGcuuuGGTsT | 4631 |
| | | | (3108C) stab05 | | |
| 3548 | AACGUAACCGCUGUGAUUCUAGA | 4600 | HDAC9v4: 3566L21 siNA antisense | uAGAAucAcAGcGGuuAcGTsT | 4632 |
| | | | (3548C) stab05 | | |
| 3573 | UACAGUAAACCACGAUUGGAAGA | 4601 | HDAC9v4: 3591L21 siNA antisense | uuccAAucGuGGuuuAcuGTsT | 4633 |
| | | | (3573C) stab05 | | |
| 3822 | UAGCUAUGAACGGAUCGUAAUUC | 4602 | HDAC9v4: 3840L21 siNA antisense | AuuAcGAuccGuucAuAGcTsT | 4634 |
| | | | (3822C) stab05 | | |
| 987 | AACAAUGGGCCAACUGGAAGUGU | 4603 | HDAC9v4: 1005L21 siNA antisense | AcuuccAGuuGGcccAuuGTsT | 4635 |
| | | | (987C) stab05 | | |
| 2292 | CCCAGGAUACUCCUAGGUGAUGA | 4604 | HDAC9v4: 2310L21 siNA antisense | AucAccuAGGAGuAuccuGTsT | 4636 |
| | | | (2292C) stab05 | | |
| 2294 | CAGGAUACUCCUAGGUGAUGACU | 4605 | HDAC9v4: 2312L21 siNA antisense | ucAucAccuAGGAGuAuccTsT | 4637 |
| | | | (2294C) stab05 | | |
| 3114 | AGCCCGAAUAUGAAUGCUGUUAU | 4606 | HDAC9v4: 3132L21 siNA antisense | AAcAGcAuucAuAuucGGGTsT | 4638 |
| | | | (3114C) stab05 | | |
| 3108 | CACCAAAGCCCGAAUAUGAAUGC | 4599 | HDAC9v4: 3108U21 siNA sense | B ccAAAGcccGAAuAuGAAuTT B | 4639 |
| | | | stab07 | | |
| 3548 | AACGUAACCGCUGUGAUUCUAGA | 4600 | HDAC9v4: 3548U21 siNA sense | B cGuAAccGcuGuGAuucuATT B | 4640 |
| | | | stab07 | | |
| 3573 | UACAGUAAACCACGAUUGGAAGA | 4601 | HDAC9v4: 3573U21 siNA sense | B cAGuAAAccAcGAuuGGAATT B | 4641 |
| | | | stab07 | | |
| 3822 | UAGCUAUGAACGGAUCGUAAUUC | 4602 | HDAC9v4: 3822U21 siNA sense | B GcuAuGAAcGGAucGuAAuTT B | 4642 |
| | | | stab07 | | |
| 987 | AACAAUGGGCCAACUGGAAGUGU | 4603 | HDAC9v4: 987U21 siNA sense | B cAAuGGGccAAcuGGAAGuTT B | 4643 |
| | | | stab07 | | |
| 2292 | CCCAGGAUACUCCUAGGUGAUGA | 4604 | HDAC9v4: 2292U21 siNA sense | B cAGGAuAcuccuAGGuGAuTT B | 4644 |
| | | | stab07 | | |
| 2294 | CAGGAUACUCCUAGGUGAUGACU | 4605 | HDAC9v4: 2294U21 siNA sense | B GGAuAcuccuAGGuGAuGATT B | 4645 |
| | | | stab07 | | |
| 3114 | AGCCCGAAUAUGAAUGCUGUUAU | 4606 | HDAC9v4: 3114U21 siNA sense | B cccGAAuAuGAAuGcuGuuTT B | 4646 |
| | | | stab07 | | |
| 3108 | CACCAAAGCCCGAAUAUGAAUGC | 4599 | HDAC9v4: 3126L21 siNA antisense | AuucAuAuucGGGcuuuGGTsT | 4647 |
| | | | (3108C) stab11 | | |
| 3548 | AACGUAACCGCUGUGAUUCUAGA | 4600 | HDAC9v4: 3566L21 siNA antisense | uAGAAucAcAGcGGuuAcGTsT | 4648 |
| | | | (3548C) stab11 | | |
| 3573 | UACAGUAAACCACGAUUGGAAGA | 4601 | HDAC9v4: 3591L21 siNA antisense | uuccAAucGuGGuuuAcuGTsT | 4649 |
| | | | (3573C) stab11 | | |
| 3822 | UAGCUAUGAACGGAUCGUAAUUC | 4602 | HDAC9v4: 3840L21 siNA antisense | AuuAcGAuccGuucAuAGcTsT | 4650 |
| | | | (3822C) stab11 | | |
| 987 | AACAAUGGGCCAACUGGAAGUGU | 4603 | HDAC9v4: 1005L21 siNA antisense | AcuuccAGuuGGcccAuuGTsT | 4651 |
| | | | (987C) stab11 | | |
| 2292 | CCCAGGAUACUCCUAGGUGAUGA | 4604 | HDAC9v4: 2310L21 siNA antisense | AucAccuAGGAGuAuccuGTsT | 4652 |
| | | | (2292C) stab11 | | |
| 2294 | CAGGAUACUCCUAGGUGAUGACU | 4605 | HDAC9v4: 2312L21 siNA antisense | ucAucAccuAGGAGuAuccTsT | 4653 |
| | | | (2294C) stab11 | | |
| 3114 | AGCCCGAAUAUGAAUGCUGUUAU | 4606 | HDAC9v4: 3132L21 siNA antisense | AAcAGcAuucAuAuucGGGTsT | 4654 |
| | | | (3114C) stab11 | | |
| 3108 | CACCAAAGCCCGAAUAUGAAUGC | 4599 | HDAC9v4: 3108U21 siNA sense | B ccAAAGcccGAAuAuGAAuTT B | 4655 |
| | | | stab18 | | |
| 3548 | AACGUAACCGCUGUGAUUCUAGA | 4600 | HDAC9v4: 3548U21 siNA sense | B cGuAAccGcuGuGAuucuATT B | 4656 |
| | | | stab18 | | |
| 3573 | UACAGUAAACCACGAUUGGAAGA | 4601 | HDAC9v4: 3573U21 siNA sense | B cAGuAAAccAcGAuuGGAATT B | 4657 |
| | | | stab18 | | |
| 3822 | UAGCUAUGAACGGAUCGUAAUUC | 4602 | HDAC9v4: 3822U21 siNA sense | B GcuAuGAAcGGAucGuAAuTT B | 4658 |
| | | | stab18 | | |
| 987 | AACAAUGGGCCAACUGGAAGUGU | 4603 | HDAC9v4: 987U21 siNA sense | B cAAuGGGccAAcuGGAAGuTT B | 4659 |
| | | | stab18 | | |
| 2292 | CCCAGGAUACUCCUAGGUGAUGA | 4604 | HDAC9v4: 2292U21 siNA sense | B cAGGAuAcuccuAGGuGAuTT B | 4660 |
| | | | stab18 | | |
| 2294 | CAGGAUACUCCUAGGUGAUGACU | 4605 | HDAC9v4: 2294U21 siNA sense | B GGAuAcuccuAGGuGAuGATT B | 4661 |
| | | | stab18 | | |
| 3114 | AGCCCGAAUAUGAAUGCUGUUAU | 4606 | HDAC9v4: 3114U21 siNA sense | B cccGAAuAuGAAuGcuGuuTT B | 4662 |
| | | | stab18 | | |
| 3108 | CACCAAAGCCCGAAUAUGAAUGC | 4599 | HDAC9v4: 3126L21 siNA antisense | AuucAuAuucGGGcuuuGGTsT | 4663 |
| | | | (3108C) stab08 | | |
| 3548 | AACGUAACCGCUGUGAUUCUAGA | 4600 | HDAC9v4: 3566L21 siNA antisense | uAGAAucAcAGcGGuuAcGTsT | 4664 |
| | | | (3548C) stab08 | | |
| 3573 | UACAGUAAACCACGAUUGGAAGA | 4601 | HDAC9v4: 3591L21 siNA antisense | uuccAAucGuGGuuuAcuGTsT | 4665 |
| | | | (3573C) stab08 | | |
| 3822 | UAGCUAUGAACGGAUCGUAAUUC | 4602 | HDAC9v4: 3840L21 siNA antisense | AuuAcGAuccGuucAuAGcTsT | 4666 |
| | | | (3822C) stab08 | | |
| 987 | AACAAUGGGCCAACUGGAAGUGU | 4603 | HDAC9v4: 1005L21 siNA antisense | AcuuccAGuuGGcccAuuGTsT | 4667 |
| | | | (987C) stab08 | | |
| 2292 | CCCAGGAUACUCCUAGGUGAUGA | 4604 | HDAC9v4: 2310L21 siNA antisense | AucAccuAGGAGuAuccuGTsT | 4668 |
| | | | (2292C) stab08 | | |
| 2294 | CAGGAUACUCCUAGGUGAUGACU | 4605 | HDAC9v4: 2312L21 siNA antisense | ucAucAccuAGGAGuAuccTsT | 4669 |
| | | | (2294C) stab08 | | |
| 3114 | AGCCCGAAUAUGAAUGCUGUUAU | 4606 | HDAC9v4: 3132L21 siNA antisense | AAcAGcAuucAuAuucGGGTsT | 4670 |
| | | | (3114C) stab08 | | |
| 3108 | CACCAAAGCCCGAAUAUGAAUGC | 4599 | HDAC9v4: 3108U21 siNA sense | B CCAAAGCCCGAAUAUGAAUTT B | 4671 |
| | | | stab09 | | |
| 3548 | AACGUAACCGCUGUGAUUCUAGA | 4600 | HDAC9v4: 3548U21 siNA sense | B CGUAACCGCUGUGAUUCUATT B | 4672 |
| | | | stab09 | | |
| 3573 | UACAGUAAACCACGAUUGGAAGA | 4601 | HDAC9v4: 3573U21 siNA sense | B CAGUAAACCACGAUUGGAATT B | 4673 |
| | | | stab09 | | |
| 3822 | UAGCUAUGAACGGAUCGUAAUUC | 4602 | HDAC9v4: 3822U21 siNA sense | B GCUAUGAACGGAUCGUAAUTT B | 4674 |
| | | | stab09 | | |
| 987 | AACAAUGGGCCAACUGGAAGUGU | 4603 | HDAC9v4: 987U21 siNA sense | B CAAUGGGCCAACUGGAAGUTT B | 4675 |
| | | | stab09 | | |
| 2292 | CCCAGGAUACUCCUAGGUGAUGA | 4604 | HDAC9v4: 2292U21 siNA sense | B CAGGAUACUCCUAGGUGAUTT B | 4676 |
| | | | stab09 | | |
| 2294 | CAGGAUACUCCUAGGUGAUGACU | 4605 | HDAC9v4: 2294U21 siNA sense | B GGAUACUCCUAGGUGAUGATT B | 4677 |
| | | | stab09 | | |
| 3114 | AGCCCGAAUAUGAAUGCUGUUAU | 4606 | HDAC9v4: 3114U21 siNA sense | B CCCGAAUAUGAAUGCUGUUTT B | 4678 |
| | | | stab09 | | |
| 3108 | CACCAAAGCCCGAAUAUGAAUGC | 4599 | HDAC9v4: 3126L21 siNA antisense | AUUCAUAUUCGGGCUUUGGTsT | 4679 |
| | | | (3108C) stab10 | | |
| 3548 | AACGUAAGCGCUGUGAUUCUAGA | 4600 | HDAC9v4: 3566L21 siNA antisense | UAGAAUCACAGCGGUUACGTsT | 4680 |
| | | | (3548C) stab10 | | |
| 3573 | UACAGUAAACCACGAUUGGAAGA | 4601 | HDAC9v4: 3591L21 siNA antisense | UUCCAAUCGUGGUUUACUGTsT | 4681 |
| | | | (3573C) stab10 | | |
| 3822 | UAGCUAUGAACGGAUCGUAAUUC | 4602 | HDAC9v4: 3840L21 siNA antisense | AUUACGAUCCGUUCAUAGCTsT | 4682 |
| | | | (3822C) stab10 | | |
| 987 | AACAAUGGGCCAACUGGAAGUGU | 4603 | HDAC9v4: 1005L21 siNA antisense | ACUUCCAGUUGGCCCAUUGTsT | 4683 |
| | | | (987C) stab10 | | |
| 2292 | CCCAGGAUACUCCUAGGUGAUGA | 4604 | HDAC9v4: 2310L21 siNA antisense | AUCACCUAGGAGUAUCCUGTsT | 4684 |
| | | | (2292C) stab10 | | |
| 2294 | CAGGAUACUCCUAGGUGAUGACU | 4605 | HDAC9v4: 2312L21 siNA antisense | UCAUCACCUAGGAGUAUCCTsT | 4685 |
| | | | (2294C) stab10 | | |
| 3114 | AGCCCGAAUAUGAAUGCUGUUAU | 4606 | HDAC9v4: 3132L21 siNA antisense | AACAGCAUUCAUAUUCGGGTsT | 4686 |
| | | | (3114C) stab10 | | |
| 3108 | CACCAAAGCCCGAAUAUGAAUGC | 4599 | HDAC9v4: 3126L21 sNA antisense | AuucAuAuucGGGcuuuGGTT B | 4687 |
| | | | (3108C) stab19 | | |
| 3548 | AACGUAACCGCUGUGAUUCUAGA | 4600 | HDAC9v4: 3566L21 siNA antisense | uAGAAucAcAGcGGuuAcGTT B | 4688 |
| | | | (3548C) stab19 | | |
| 3573 | UACAGUAAACCACGAUUGGAAGA | 4601 | HDAC9v4: 3591L21 siNA antisense | uuccAAucGuGGuuuAcuGTT B | 4689 |
| | | | (3573C) stab19 | | |
| 3822 | UAGCUAUGAACGGAUCGUAAUUC | 4602 | HDAC9v4: 3840L21 siNA antisense | AuuAcGAuccGuucAuAGcTT B | 4690 |
| | | | (3822C) stab19 | | |
| 987 | AACAAUGGGCCAACUGGAAGUGU | 4603 | HDAC9v4: 1005L21 siNA antisense | AcuuccAGuuGGcccAuuGTT B | 4691 |
| | | | (987C) stab19 | | |
| 2292 | CCCAGGAUACUCCUAGGUGAUGA | 4604 | HDAC9v4: 2310L21 siNA antisense | AucAccuAGGAGuAuccuGTT B | 4692 |
| | | | (2292C) stab19 | | |
| 2294 | CAGGAUACUCCUAGGUGAUGACU | 4605 | HDAC9v4: 2312L21 siNA antisense | ucAucAccuAGGAGuAuccTT B | 4693 |
| | | | (2294C) stab19 | | |
| 3114 | AGCCCGAAUAUGAAUGCUGUUAU | 4606 | HDAC9v4: 3132L21 siNA antisense | AAcAGcAuucAuAuucGGGTT B | 4694 |
| | | | (3114C) stab19 | | |
| 3108 | CACCAAAGCCCGAAUAUGAAUGC | 4599 | HDAC9v4: 3126L21 siNA antisense | AUUCAUAUUCGGGCUUUGGTT B | 4695 |
| | | | (3108C) stab22 | | |
| 3548 | AACGUAACCGCUGUGAUUCUAGA | 4600 | HDAC9v4: 3566L21 siNA antisense | UAGAAUCACAGCGGUUACGTT B | 4696 |
| | | | (3548C) stab22 | | |
| 3573 | UACAGUAAACCACGAUUGGAAGA | 4601 | HDAC9v4: 3591L21 siNA antisense | UUCCAAUCGUGGUUUACUGTT B | 4697 |
| | | | (3573C) stab22 | | |
| 3822 | UAGCUAUGAACGGAUCGUAAUUC | 4602 | HDAC9v4: 3840L21 siNA antisense | AUUACGAUCCGUUCAUAGCTT B | 4698 |
| | | | (3822C) stab22 | | |
| 987 | AACAAUGGGCCAACUGGAAGUGU | 4603 | HDAC9v4: 1005L21 siNA antisense | ACUUCCAGUUGGCCCAUUGTT B | 4699 |
| | | | (987C) stab22 | | |
| 2292 | CCCAGGAUACUCCUAGGUGAUGA | 4604 | HDAC9v4: 2310L21 siNA antisense | AUCACCUAGGAGUAUCCUGTT B | 4700 |
| | | | (2292C) stab22 | | |
| 2294 | CAGGAUACUCCUAGGUGAUGACU | 4605 | HDAC9v4: 2312L21 siNA antisense | UCAUCACCUAGGAGUAUCCTT B | 4701 |
| | | | (2294C) stab22 | | |
| 3114 | AGCCCGAAUAUGAAUGCUGUUAU | 4606 | HDAC9v4: 3132L21 siNA antisense | AACAGCAUUCAUAUUCGGGTT B | 4702 |
| | | | (3114C) stab22 | | |
| 3108 | CACCAAAGCCCGAAUAUGAAUGC | 4599 | HDAC9v4: 3126L21 siNA antisense | AUUcAuAuucGGGcuuuGGTsT | 4703 |
| | | | (3108C) stab25 | | |
| 3548 | AACGUAACCGCUGUGAUUCUAGA | 4600 | HDAC9v4: 3566L21 siNA antisense | UAGAAucAcAGcGGuuAcGTsT | 4704 |
| | | | (3548C) stab25 | | |
| 3573 | UACAGUAAACCACGAUUGGAAGA | 4601 | HDAC9v4: 3591L21 siNA antisense | UUCcAAucGuGGuuuAcuGTsT | 4705 |
| | | | (3573C) stab25 | | |
| 3822 | UAGCUAUGAACGGAUCGUAAUUC | 4602 | HDAC9v4:3840L21 siNA antisense | AUUAcGAuccGuucAuAGcTsT | 4706 |
| | | | (3822C) stab25 | | |
| 987 | AACAAUGGGCCAACUGGAAGUGU | 4603 | HDAC9v4: 1005L21 siNA antisense | ACUuccAGuuGGcccAuuGTsT | 4707 |
| | | | (987C) stab25 | | |
| 2292 | CCCAGGAUACUCCUAGGUGAUGA | 4604 | HDAC9v4: 2310L21 siNA antisense | AUCAccuAGGAGuAuccuGTsT | 4708 |
| | | | (2292C) stab25 | | |
| 2294 | CAGGAUACUCCUAGGUGAUGACU | 4605 | HDAC9v4: 2312L21 siNA antisense | UCAucAccuAGGAGuAuccTsT | 4709 |
| | | | (2294C) stab25 | | |
| 3114 | AGCCCGAAUAUGAAUGCUGUUAU | 4606 | HDAC9v4: 3132L21 siNA antisense | AACAGcAuucAuAuucGGGTsT | 4710 |
| | | | (3114C) stab25 | | |

HDAC11

| | | | | | |
|---|---|---|---|---|---|
| 500 | CACGCUCGCCAUCAAGUUUCUGU | 4905 | HDAC11: 500U21 siNA sense | CGCUCGCCAUCAAGUUUCUTT | 4913 |
| 777 | CCCGACGUGGUGGUAUACAAUGC | 4906 | HDAC11: 777U21 siNA sense | CGACGUGGUGGUAUACAAUTT | 4914 |
| 899 | CCGCCGGGUGCCCAUCCUUAUGG | 4907 | HDAC11: 899U21 siNA sense | GCCGGGUGCCCAUCCUUAUTT | 4915 |
| 957 | AUCAUUGCUGACUCCAUACUUAA | 4908 | HDAC11: 957U21 siNA sense | CAUUGCUGACUCCAUACUUTT | 4916 |
| 1333 | GGCAGGCAGUUAACUGAGAAUUG | 4909 | HDAC11: 1333U21 siNA sense | CAGGCAGUUAACUGAGAAUTT | 4917 |
| 19 | GCCCCGGGAUGCUACACACAACC | 4910 | HDAC11: 19U21 siNA sense | CCCGGGAUGCUACACACAATT | 4918 |
| 79 | UCGUGUACUCGCCGCGCUACAAC | 4911 | HDAC11: 79U21 siNA sense | GUGUACUCGCCGCGCUACATT | 4919 |
| 491 | UGCGGACAUCACGCUCGCCAUCA | 4912 | HDAC11: 491U21 siNA sense | CGGACAUCACGCUCGCCAUTT | 4920 |
| 500 | CACGCUCGCCAUCPAGUUUCUGU | 4905 | HDAC11: 518L21 siNA antisense | AGAAACUUGAUGGCGAGCGTT | 4921 |
| | | | (500C) | | |
| 777 | CCCGACGUGGUGGUAUACAAUGC | 4906 | HDAC11: 795L21 siNA antisense | AUUGUAUACCACCACGUCGTT | 4922 |
| | | | (777C) | | |
| 899 | CCGCCGGGUGCCCAUCCUUAUGG | 4907 | HDAC11: 917L21 siNA antisense | AUAAGGAUGGGCACCCGGCTT | 4923 |
| | | | (899C) | | |
| 957 | AUCAUUGCUGACUCCAUACUUAA | 4908 | HDAC11: 975L21 siNA antisense | AAGUAUGGAGUCAGCAAUGTT | 4924 |
| | | | (957C) | | |
| 1333 | GGCAGGCAGUUAACUGAGAAUUG | 4909 | HDAC11: 1351L21 siNA antisense | AUUCUCAGUUAACUGCCUGTT | 4925 |
| | | | (1333C) | | |
| 19 | GCCCCGGGAUGCUACACACAACC | 4910 | HDAC11: 37L21 siNA antisense | UUGUGUGUAGCAUCCCGGGTT | 4926 |
| | | | (19C) | | |
| 79 | UCGUGUACUCGCCGCGCUACAAC | 4911 | HDAC11: 97L21 siNA antisense | UGUAGCGCGGCGAGUACACTT | 4927 |
| | | | (79C) | | |
| 491 | UGCGGACAUCACGCUCGCCAUCA | 4912 | HDAC11: 509L21 siNA antisense | AUGGCGAGCGUGAUGUCCGTT | 4928 |
| | | | (491C) | | |
| 500 | CACGCUCGCCAUCAAGUUUCUGU | 4905 | HDAC11: 500U21 siNA sense | B cGcucGccAucAAGuuucuTT B | 4929 |
| | | | stab04 | | |
| 777 | CCCGACGUGGUGGUAUACAAUGC | 4906 | HDAC11: 777U21 siNA sense | B cGAcGuGGuGGuAuAcAAuTT B | 4930 |
| | | | stab04 | | |
| 899 | CCGCCGGGUGCCCAUCCUUAUGG | 4907 | HDAC11: 899U21 siNA sense | B GccGGGuGcccAuccuuAuTT B | 4931 |
| | | | stab04 | | |
| 957 | AUCAUUGCUGACUCCAUACUUAA | 4908 | HDAC11: 957U21 siNA sense | B cAuuGcuGAcuccAuAcuuTT B | 4932 |
| | | | stab04 | | |
| 1333 | GGCAGGCAGUUAACUGAGAAUUG | 4909 | HDAC11: 1333U21 siNA sense | B cAGGcAGuuAAcuGAGAAuTT B | 4933 |
| | | | stab04 | | |
| 19 | GCCCCGGGAUGCUACACACAACC | 4910 | HDAC11: 19U21 siNA sense stab04 | B cccGGGAuGcuAcAcAcAATT B | 4934 |
| 79 | UCGUGUACUCGCCGCGCUACAAC | 4911 | HDAC11: 79U21 siNA sense stab04 | B GuGuAcucGccGcGcuAcATT B | 4935 |
| 491 | UGCGGACAUCACGCUCGCCAUCA | 4912 | HDAC11: 491U21 siNA sense | B cGGAcAucAcGcucGccAuTT B | 4936 |
| | | | stab04 | | |
| 500 | CACGCUCGCCAUCAAGUUUCUGU | 4905 | HDAC11: 518L21 siNA antisense | AGAAAcuuGAuGGcGAGcGTsT | 4937 |
| | | | (500C) stab05 | | |
| 777 | CCCGACGUGGUGGUAUACAAUGC | 4906 | HDAC11: 795L21 siNA antisense | AuuGuAuAccAccAcGucGTsT | 4938 |
| | | | (777C) stab05 | | |
| 899 | CCGCCGGGUGCCCAUCCUUAUGG | 4907 | HDAC11: 917L21 siNA antisense | AuAAGGAuGGGcAcccGGcTsT | 4939 |
| | | | (899C) stab05 | | |
| 957 | AUCAUUGCUGACUCCAUACUUAA | 4908 | HDAC11: 975L21 siNA antisense | AAGuAuGGAGucAGcAAuGTsT | 4940 |
| | | | (957C) stab05 | | |
| 1333 | GGCAGGCAGUUAACUGAGAAUUG | 4909 | HDAC11: 1351L21 siNA antisense | AuucucAGuuAAcuGccuGTsT | 4941 |
| | | | (1333C) stab05 | | |
| 19 | GCCCCGGGAUGCUACACACAACC | 4910 | HDAC11: 37L21 siNA antisense | uuGuGuGuAGcAucccGGGTsT | 4942 |
| | | | (19C) stab05 | | |
| 79 | UCGUGUACUCGCCGCGCUACAAC | 4911 | HDAC11: 97L21 siNA antisense | uGuAGcGcGGcGAGuAcAcTsT | 4943 |
| | | | (79C) stab05 | | |
| 491 | UGCGGACAUCACGCUCGCCAUCA | 4912 | HDAC11: 509L21 siNA antisense | AuGGcGAGcGuGAuGuccGTsT | 4944 |
| | | | (491C) stab05 | | |
| 500 | CACGCUCGCCAUCAAGUUUCUGU | 4905 | HDAC11: 500U21 siNA sense | B cGcucGccAucAAGuuucuTT B | 4945 |
| | | | stab07 | | |
| 777 | CCCGACGUGGUGGUAUACAAUGC | 4906 | HDAC11: 777U21 siNA sense | B cGAcGuGGuGGuAuAcAAuTT B | 4946 |
| | | | stab07 | | |
| 899 | CCGCCGGGUGCCCAUCCUUAUGG | 4907 | HDAC11: 899U21 siNA sense | B GccGGGuGcccAuccuuAuTT B | 4947 |
| | | | stab07 | | |
| 957 | AUCAUUGCUGACUCCAUACUUAA | 4908 | HDAC11: 957U21 siNA sense | B cAuuGcuGAcuccAuAcuuTT B | 4948 |
| | | | stab07 | | |
| 1333 | GGCAGGCAGUUAACUGAGAAUUG | 4909 | HDAC11: 1333U21 siNA sense | B cAGGcAGuuAAcuGAGAAuTT B | 4949 |
| | | | stab07 | | |
| 19 | GCCCCGGGAUGCUACACACAACC | 4910 | HDAC11: 19U21 siNA sense | B cccGGGAuGcuAcAcAcAATT B | 4950 |
| | | | stab07 | | |
| 79 | UCGUGUACUCGCCGCGCUACAAC | 4911 | HDAC11: 79U21 siNA sense | B GuGuAcucGccGcGcuAcATT B | 4951 |
| | | | stab07 | | |
| 491 | UGCGGACAUCACGCUCGCCAUCA | 4912 | HDAC11: 491U21 siNA sense | B cGGAcAucAcGcucGccAuTT B | 4952 |
| | | | stab07 | | |
| 500 | CACGCUCGCCAUCAAGUUUCUGU | 4905 | HDAC11: 518L21 siNA antisense | AGAAAcuuGAuGGcGAGcGTsT | 4953 |
| | | | (500C) stab11 | | |
| 777 | CCCGACGUGGUGGUAUACAAUGC | 4906 | HDAC11: 795L21 siNA antisense | AuuGuAuAccAccAcGucGTsT | 4954 |
| | | | (777C) stab11 | | |
| 899 | CCGCCGGGUGCCCAUCCUUAUGG | 4907 | HDAC11: 917L21 siNA antisense | AuAAGGAuGGGcAcccGGcTsT | 4955 |
| | | | (899C) stab11 | | |
| 957 | AUCAUUGCUGACUCCAUACUUAA | 4908 | HDAC11: 975L21 siNA antisense | AAGuAuGGAGucAGcAAuGTsT | 4956 |
| | | | (957C) stab11 | | |
| 1333 | GGCAGGCAGUUAACUGAGAAUUG | 4909 | HDAC11: 1351L21 siNA antisense | AuucucAGuuAAcuGccuGTsT | 4957 |
| | | | (1333C) stab11 | | |
| 19 | GCCCCGGGAUGCUACACACAACC | 4910 | HDAC11: 37L21 siNA antisense | uuGuGuGuAGcAucccGGGTsT | 4958 |
| | | | (19C) stab11 | | |
| 79 | UCGUGUACUCGCCGCGCUACAAC | 4911 | HDAC11: 97L21 siNA antisense | uGuAGcGcGGcGAGuAcAcTsT | 4959 |
| | | | (79C) stab11 | | |
| 491 | UGCGGACAUCACGCUCGCCAUCA | 4912 | HDAC11: 509L21 siNA antisense | AuGGcGAGcGuGAuGuccGTsT | 4960 |
| | | | (491C) stab11 | | |
| 500 | CACGCUCGCCAUCAAGUUUCUGU | 4905 | HDAC11: 500U21 siNA sense | B cGcucGccAucAAGuuucuTT B | 4961 |
| | | | stab18 | | |
| 777 | CCCGACGUGGUGGUAUACAAUGC | 4906 | HDAC11: 777U21 siNA sense | B cGAcGuGGuGGuAuAcAAuTT B | 4962 |
| | | | stab18 | | |
| 899 | CCGCCGGGUGCCCAUCCUUAUGG | 4907 | HDAC11: 899U21 siNA sense | B GccGGGuGcccAuccuuAuTT B | 4963 |
| | | | stab18 | | |
| 957 | AUCAUUGCUGACUCCAUACUUAA | 4908 | HDAC11: 957U21 siNA sense | B cAuuGcuGAcuccAuAcuuTT B | 4964 |
| | | | stab18 | | |
| 1333 | GGCAGGCAGUUAACUGAGAAUUG | 4909 | HDAC11: 1333U21 siNA sense | B cAGGcAGuuAAcuGAGAAuTT B | 4965 |
| | | | stab18 | | |
| 19 | GCCCCGGGAUGCUACACACAACC | 4910 | HDAC11: 19U21 siNA sense | B cccGGGAuGcuAcAcAcAATT B | 4966 |
| | | | stab18 | | |
| 79 | UCGUGUACUCGCCGCGCUACAAC | 4911 | HDAC11: 79U21 siNA sense | B GuGuAcucGccGcGcuAcATT B | 4967 |
| | | | stab18 | | |
| 491 | UGCGGACAUCACGCUCGCCAUCA | 4912 | HDAC11: 491U21 siNA sense | B cGGAcAucAcGcucGccAuTT B | 4968 |
| | | | stab18 | | |
| 500 | CACGCUCGCCAUCAAGUUUCUGU | 4905 | HDAC11: 518L21 siNA antisense | AGAAAcuuGAuGGcGAGcGTsT | 4969 |
| | | | (500C) stab08 | | |
| 777 | CCCGACGUGGUGGUAUACAAUGC | 4906 | HDAC11: 795L21 siNA antisense | AuuGuAuAccAccAcGucGTsT | 4970 |
| | | | (777C) stab08 | | |
| 899 | CCGCCGGGUGCCCAUCCUUAUGG | 4907 | HDAC11: 917L21 siNA antisense | AuAAGGAuGGGcAcccGGcTsT | 4971 |
| | | | (899C) stab08 | | |
| 957 | AUCAUUGCUGACUCCAUACUUAA | 4908 | HDAC11: 975L21 siNA antisense | AAGuAuGGAGucAGcAAuGTsT | 4972 |
| | | | (957C) stab08 | | |
| 1333 | GGCAGGCAGUUAACUGAGAAUUG | 4909 | HDAC11: 1351L21 siNA antisense | AuucucAGuuAAcuGccuGTsT | 4973 |
| | | | (1333C) stab08 | | |
| 19 | GCCCCGGGAUGCUACACACAACC | 4910 | HDAC11: 37L21 siNA antisense | uuGuGuGuAGcAucccGGGTsT | 4974 |
| | | | (19C) stab08 | | |
| 79 | UCGUGUACUCGCCGCGCUACAAC | 4911 | HDAC11: 97L21 siNA antisense | uGuAGcGcGGcGAGuAcAcTsT | 4975 |
| | | | (79C) stab08 | | |
| 491 | UGCGGACAUCACGCUCGCCAUCA | 4912 | HDAC11: 509L21 siNA antisense | AuGGcGAGcGuGAuGuccGTsT | 4976 |
| | | | (491C) stab08 | | |
| 500 | CACGCUCGCCAUCAAGUUUCUGU | 4905 | HDAC11: 500U21 siNA sense | B CGCUCGCCAUCAAGUUUCUTT B | 4977 |
| | | | stab09 | | |
| 777 | CCCGACGUGGUGGUAUACAAUGC | 4906 | HDAC11: 777U21 siNA sense | B CGACGUGGUGGUAUACAAUTT B | 4978 |
| | | | stab09 | | |
| 899 | CCGCCGGGUGCCCAUCCUUAUGG | 4907 | HDAC11: 899U21 siNA sense | B GCCGGGUGCCCAUCCUUAUTT B | 4979 |
| | | | stab09 | | |
| 957 | AUCAUUGCUGACUCCAUACUUAA | 4908 | HDAC11: 957U21 siNA sense | B CAUUGCUGACUCCAUACUUTT B | 4980 |
| | | | stab09 | | |
| 1333 | GGCAGGCAGUUAACUGAGAAUUG | 4909 | HDAC11: 1333U21 siNA sense | B CAGGCAGUUAACUGAGAAUTT B | 4981 |
| | | | stab09 | | |
| 19 | GCCCCGGGAUGCUACACACAACC | 4910 | HDAC11: 19U21 siNA sense stab09 | B CCCGGGAUGCUACACACAATT B | 4982 |
| 79 | UCGUGUACUCGCCGCGCUACAAC | 4911 | HDAC11: 79U21 siNA sense stab09 | B GUGUACUCGCCGCGCUACATT B | 4983 |
| 491 | UGCGGACAUCACGCUCGCCAUCA | 4912 | HDAC11: 491U21 siNA sense | B CGGACAUCACGCUCGCCAUTT B | 4984 |
| | | | stab09 | | |
| 500 | CACGCUCGCCAUCAAGUUUCUGU | 4905 | HDAC11: 518L21 siNA antisense | AGAAACUUGAUGGCGAGCGTsT | 4985 |
| | | | (500C) stab10 | | |
| 777 | CCCGACGUGGUGGUAUACAAUGC | 4906 | HDAC11: 795L21 siNA antisense | AUUGUAUACCACCACGUCGTsT | 4986 |
| | | | (777C) stab10 | | |
| 899 | CCGCCGGGUGCCCAUCCUUAUGG | 4907 | HDAC11: 917L21 siNA antisense | AUAAGGAUGGGCACCCGGCTsT | 4987 |
| | | | (899C) stab10 | | |
| 957 | AUCAUUGCUGACUCCAUACUUAA | 4908 | HDAC11: 975L21 siNA antisense | AAGUAUGGAGUCAGCAAUGTsT | 4988 |
| | | | (957C) stab10 | | |
| 1333 | GGCAGGCAGUUAACUGAGAAUUG | 4909 | HDAC11: 1351L21 siNA antisense | AUUCUCAGUUAACUGCCUGTsT | 4989 |
| | | | (1333C) stab10 | | |
| 19 | GCCCCGGGAUGCUACACACAACC | 4910 | HDAC11: 137L21 siNA antisense | UUGUGUGUAGCAUCCCGGGTsT | 4990 |
| | | | (19C) stab10 | | |
| 79 | UCGUGUACUCGCCGCGCUACAAC | 4911 | HDAC11: 97L21 siNA antisense | UGUAGCGCGGCGAGUACACTsT | 4991 |
| | | | (79C) stab10 | | |
| 491 | UGCGGACAUCACGCUCGCCAUCA | 4912 | HDAC11: 509L21 siNA antisense | AUGGCGAGCGUGAUGUCCGTsT | 4992 |
| | | | (491C) stab10 | | |
| 500 | CACGCUCGCCAUCAAGUUUCUGU | 4905 | HDAC11: 518L21 siNA antisense | AGAAAcuuGAuGGcGAGcGTT B | 4993 |
| | | | (500C) stab19 | | |
| 777 | CCCGACGUGGUGGUAUACAAUGC | 4906 | HDAC11: 795L21 siNA antisense | AuuGuAuAccAccAcGucGTT B | 4994 |
| | | | (777C) stab19 | | |
| 899 | CCGCCGGGUGCCCAUCCUUAUGG | 4907 | HDAC11: 917L21 siNA antisense | AuAAGGAuGGGcAcccGGcTT B | 4995 |
| | | | (899C) stab19 | | |
| 957 | AUCAUUGCUGACUCCAUACUUAA | 4908 | HDAC11: 975L21 siNA antisense | AAGuAuGGAGucAGcAAuGTT B | 4996 |
| | | | (957C) stab19 | | |
| 1333 | GGCAGGCAGUUAACUGAGAAUUG | 4909 | HDAC11: 1351L21 siNA antisense | AuucucAGuuAAcuGccuGTT B | 4997 |
| | | | (1333C) stab19 | | |
| 19 | GCCCCGGGAUGCUACACACAACC | 4910 | HDAC11: 37L21 siNA antisense | uuGuGuGuAGcAucccGGGTT B | 4998 |
| | | | (19C) stab19 | | |
| 79 | UCGUGUACUCGCCGCGCUACAAC | 4911 | HDAC11: 97L21 siNA antisense | uGuAGcGcGGcGAGuAcAcTT B | 4999 |
| | | | (79C) stab19 | | |
| 491 | UGCGGACAUCACGCUCGCCAUCA | 4912 | HDAC11: 509L21 siNA antisense | AuGGcGAGcGuGAuGuccGTT B | 5000 |
| | | | (491C) stab19 | | |
| 500 | CACGCUCGCCAUCAAGUUUCUGU | 4905 | HDAC11: 518L21 siNA antisense | AGAAACUUGAUGGCGAGCGTT B | 5001 |
| | | | (500C) stab22 | | |
| 777 | CCCGACGUGGUGGUAUACAAUGC | 4906 | HDAC11: 795L21 siNA antisense | AUUGUAUACCACCACGUCGTT B | 5002 |
| | | | (777C) stab22 | | |
| 899 | CCGCCGGGUGCCCAUCCUUAUGG | 4907 | HDAC11: 917L21 siNA antisense | AUAAGGAUGGGCACCCGGCTT B | 5003 |
| | | | (899C) stab22 | | |
| 957 | AUCAUUGCUGACUCCAUACUUAA | 4908 | HDAC11: 975L21 siNA antisense | AAGUAUGGAGUCAGCAAUGTT B | 5004 |
| | | | (957C) stab22 | | |
| 1333 | GGCAGGCAGUUAACUGAGAAUUG | 4909 | HDAC11: 1351L21 siNA antisense | AUUCUCAGUUAACUGCCUGTT B | 5005 |
| | | | (1333C) stab22 | | |
| 19 | GCCCCGGGAUGCUACACACAACC | 4910 | HDAC11: 37L21 siNA antisense | UUGUGUGUAGCAUCCCGGGTT B | 5006 |
| | | | (19C) stab22 | | |
| 79 | UCGUGUACUCGCCGCGCUACAAC | 4911 | HDAC11: 97L21 siNA antisense | UGUAGCGCGGCGAGUACACTT B | 5007 |
| | | | (79C) stab22 | | |
| 491 | UGCGGACAUCACGCUCGCCAUCA | 4912 | HDAC11: 509L21 siNA antisense | AUGGCGAGCGUGAUGUCCGTT B | 5008 |
| | | | (491C) stab22 | | |
| 500 | CACGCUCGCCAUCAAGUUUCUGU | 4905 | HDAC11: 518L21 siNA antisense | AGAAAcuuGAuGGcGAGcGTsT | 5009 |
| | | | (500C) stab25 | | |
| 777 | CCCGACGUGGUGGUAUACAAUGC | 4906 | HDAC11: 795L21 siNA antisense | AUUGuAuAccAccAcGucGTsT | 5010 |
| | | | (777C) stab25 | | |
| 899 | CCGCCGGGUGCCCAUCCUUAUGG | 4907 | HDAC11: 917L21 siNA antisense | AUAAGGAuGGGcAcccGGcTsT | 5011 |
| | | | (899C) stab25 | | |
| 957 | AUCAUUGCUGACUCCAUACUUAA | 4908 | HDAC11: 975L21 siNA antisense | AAGuAuGGAGucAGcAAuGTsT | 5012 |
| | | | (957C) stab25 | | |
| 1333 | GGCAGGCAGUUAACUGAGAAUUG | 4909 | HDAC11: 1351L21 siNA antisense | AUUcucAGuuAAcuGccuGTsT | 5013 |
| | | | (1333C) stab25 | | |
| 19 | GCCCCGGGAUGCUACACACAACC | 4910 | HDAC11: 37L21 siNA antisense | UUGuGuGuAGcAucccGGGTsT | 5014 |
| | | | (19C) stab25 | | |
| 79 | UCGUGUACUCGCCGCGCUACAAC | 4911 | HDAC11: 97L21 siNA antisense | UGUAGcGcGGcGAGuAcAcTsT | 5015 |
| | | | (79C) stab25 | | |
| 491 | UGCGGACAUCACGCUCGCCAUCA | 4912 | HDAC11: 509L21 siNA antisense | AUGGcGAGcGuGAuGuccGTsT | 5016 |
| | | | (491C) stab25 | | |

Uppercase = ribonucleotide
u,c = 2′-deoxy-2′-fluoro U,C
T = thymidine
B = inverted deoxy abasic
s = phosphorothioate linkage
A = deoxy Adenosine
G = deoxy Guanosine
G = 2′-O-methyl Guanosine
A = 2′-O-methyl Adenosine

[0542] TABLE IV
Non-limiting examples of Stabilization Chemistries
for chemically modified siNA constructs

| Chemistry | pyrimidine | Purine | cap | p = S | Strand |
|---|---|---|---|---|---|
| “Stab 00” | Ribo | Ribo | TT at 3′- | | S/AS |
| | | | ends | | |
| “Stab 1” | Ribo | Ribo | — | 5 at 5′-end | S/AS |
| | | | | 1 at 3′-end | |
| “Stab 2” | Ribo | Ribo | — | All linkages | Usually AS |
| “Stab 3” | 2′-fluoro | Ribo | — | 4 at 5′-end | Usually S |
| | | | | 4 at 3′-end | |
| “Stab 4” | 2′-fluoro | Ribo | 5′ and 3′- | — | Usually S |
| | | | ends | | |
| “Stab 5” | 2′-fluoro | Ribo | — | 1 at 3′-end | Usually AS |
| “Stab 6” | 2′-O-Methyl | Ribo | 5′ and 3′- | — | Usually S |
| | | | ends | | |
| “Stab 7” | 2′-fluoro | 2′-deoxy | 5′ and 3′- | — | Usually S |
| | | | ends | | |
| “Stab 8” | 2′-fluoro | 2′-O- | — | 1 at 3′-end | S/AS |
| | | Methyl | | | |
| “Stab 9” | Ribo | Ribo | 5′ and 3′- | — | Usually S |
| | | | ends | | |
| “Stab 10” | Ribo | Ribo | — | 1 at 3′-end | Usually AS |
| “Stab 11” | 2′-fluoro | 2′-deoxy | — | 1 at 3′-end | Usually AS |
| “Stab 12” | 2′-fluoro | LNA | 5′ and 3′- | | Usually S |
| | | | ends | | |
| “Stab 13” | 2′-fluoro | LNA | | 1 at 3′-end | Usually AS |
| “Stab 14” | 2′-fluoro | 2′-deoxy | | 2 at 5′-end | Usually AS |
| | | | | 1 at 3′-end | |
| “Stab 15” | 2′-deoxy | 2′-deoxy | | 2 at 5′-end | Usually AS |
| | | | | 1 at 3′-end | |
| “Stab 16” | Ribo | 2′-O- | 5′ and 3′- | | Usually S |
| | | Methyl | ends | | |
| “Stab 17” | 2′-O-Methyl | 2′-O- | 5′ and 3′- | | Usually S |
| | | Methyl | ends | | |
| “Stab 18” | 2′-fluoro | 2′-O- | 5′ and 3′- | | Usually S |
| | | Methyl | ends | | |
| “Stab 19” | 2′-fluoro | 2′-O- | 3′-end | | S/AS |
| | | Methyl | | | |
| “Stab 20” | 2′-fluoro | 2′-deoxy | 3′-end | | Usually AS |
| “Stab 21” | 2′-fluoro | Ribo | 3′-end | | Usually AS |
| “Stab 22” | Ribo | Ribo | 3′-end | | Usually AS |
| “Stab 23” | 2′-fluoro* | 2′-deoxy* | 5′ and 3′- | | Usually S |
| | | | ends | | |
| “Stab 24” | 2′-fluoro* | 2′-O- | — | 1 at 3′-end | S/AS |
| | | Methyl* | | | |
| “Stab 25” | 2′-fluoro* | 2′-O- | — | 1 at 3′-end | S/AS |
| | | Methyl* | | | |
| “Stab 26” | 2′-fluoro* | 2′-O- | — | | S/AS |
| | | Methyl* | | | |
| “Stab 27” | 2′-fluoro* | 2′-O- | 3′-end | | S/AS |
| | | Methyl* | | | |
| “Stab 28” | 2′-fluoro* | 2′-O- | 3′-end | | S/AS |
| | | Methyl* | | | |
| “Stab 29” | 2′-fluoro* | 2′-O- | | 1 at 3′-end | S/AS |
| | | Methyl* | | | |
| “Stab 30” | 2′-fluoro* | 2′-O- | | | S/AS |
| | | Methyl* | | | |
| “Stab 31” | 2′-fluoro* | 2′-O- | 3′-end | | S/AS |
| | | Methyl* | | | |
| “Stab 32” | 2′-fluoro | 2′-O- | | | S/AS |
| | | Methyl | | | |
| “Stab 33” | 2′-fluoro | 2′-deoxy* | 5′ and 3′- | — | Usually S |
| | | | ends | | |
| “Stab 34” | 2′-fluoro | 2′-O- | 5′ and 3′- | | Usually S |
| | | Methyl* | ends | | |
| “Stab 3F” | 2′-OCF3 | Ribo | — | 4 at 5′-end | Usually S |
| | | | | 4 at 3′-end | |
| “Stab 4F” | 2′-OCF3 | Ribo | 5′ and 3′- | — | Usually S |
| | | | ends | | |
| “Stab 5F” | 2′-OCF3 | Ribo | — | 1 at 3′-end | Usually AS |
| “Stab 7F” | 2′-OCF3 | 2′-deoxy | 5′ and 3′- | — | Usually S |
| | | | ends | | |
| “Stab 8F” | 2′-OCF3 | 2′-O- | — | 1 at 3′-end | S/AS |
| | | Methyl | | | |
| “Stab 11F” | 2′-OCF3 | 2′-deoxy | — | 1 at 3′-end | Usually AS |
| “Stab 12F” | 2′-OCF3 | LNA | 5′ and 3′- | | Usually S |
| | | | ends | | |
| “Stab 13F” | 2′-OCF3 | LNA | | 1 at 3′-end | Usually AS |
| “Stab 14F” | 2′-OCF3 | 2′-deoxy | | 2 at 5′-end | Usually AS |
| | | | | 1 at 3′-end | |
| “Stab 15F” | 2′-OCF3 | 2′-deoxy | | 2 at 5′-end | Usually AS |
| | | | | 1 at 3′-end | |
| “Stab 18F” | 2′-OCF3 | 2′-O- | 5′ and 3′- | | Usually S |
| | | Methyl | ends | | |
| “Stab 19F” | 2′-OCF3 | 2′-O- | 3′-end | | S/AS |
| | | Methyl | | | |
| “Stab 20F” | 2′-OCF3 | 2′-deoxy | 3′-end | | Usually AS |
| “Stab 21F” | 2′-OCF3 | Ribo | 3′-end | | Usually AS |
| “Stab 23F” | 2′-OCF3* | 2′-deoxy* | 5′ and 3′- | | Usually S |
| | | | ends | | |
| “Stab 24F” | 2′-OCF3* | 2′-O- | — | 1 at 3′-end | S/AS |
| | | Methyl* | | | |
| “Stab 25F” | 2′-OCF3* | 2′-O- | — | 1 at 3′-end | S/AS |
| | | Methyl* | | | |
| “Stab 26F” | 2′-OCF3* | 2′-O- | — | | S/AS |
| | | Methyl* | | | |
| “Stab 27F” | 2′-OCF3* | 2′-O- | 3′-end | | S/AS |
| | | Methyl* | | | |
| “Stab 28F” | 2′-OCF3* | 2′-O- | 3′-end | | S/AS |
| | | Methyl* | | | |
| “Stab 29F” | 2′-OCF3* | 2′-O- | | 1 at 3′-end | S/AS |
| | | Methyl* | | | |
| “Stab 30F” | 2′-OCF3* | 2′-O- | | | S/AS |
| | | Methyl* | | | |
| “Stab 31F” | 2′-OCF3* | 2′-O- | 3′-end | | S/AS |
| | | Methyl* | | | |
| “Stab 32F” | 2′-OCF3 | 2′-O- | | | S/AS |
| | | Methyl | | | |
| “Stab 33F” | 2′-OCF3 | 2′-deoxy* | 5′ and 3′- | — | Usually S |
| | | | ends | | |
| “Stab 34F” | 2′-OCF3 | 2′-O- | 5′ and 3′- | | Usually S |
| | | Methyl* | ends | | |

CAP = any terminal cap, see for example FIG. 10.
All Stab 00-34 chemistries can comprise 3′-terminal thymidine (TT) residues
All Stab 00-34 chemistries typically comprise about 21 nucleotides, but can vary as described herein.
S = sense strand
AS = antisense strand
*Stab 23 has a single ribonucleotide adjacent to 3′-CAP
*Stab 24 and Stab 28 have a single ribonucleotide at 5′-terminus
*Stab 25, Stab 26, and Stab 27 have three ribonucleotides at 5′-terminus
*Stab 29, Stab 30, Stab 31, Stab 33, and Stab 34 any purine at first three nucleotide positions from 5′-terminus are ribonucleotides
p = phosphorothioate linkage

[0543] TABLE V

| | | | | | |
|---|---|---|---|---|---|
| Reagent | Equivalents | Amount | Wait Time* DNA | Wait Time* 2′-O-methyl | Wait Time*RNA |

A. 2.5 μmol Synthesis Cycle ABI 394 Instrument

| | | | | | | | | | |
|---|---|---|---|---|---|---|---|---|---|
| Phosphoramidites | 6.5 | 163 | μL | 45 | sec | 2.5 | min | 7.5 | min |
| S-Ethyl Tetrazole | 23.8 | 238 | μL | 45 | sec | 2.5 | min | 7.5 | min |
| Acetic Anhydride | 100 | 233 | μL | 5 | sec | 5 | sec | 5 | sec |
| N-Methyl | 186 | 233 | μL | 5 | sec | 5 | sec | 5 | sec |
| Imidazole | | | | | | | | | |
| TCA | 176 | 2.3 | mL | 21 | sec | 21 | sec | 21 | sec |
| Iodine | 11.2 | 1.7 | mL | 45 | sec | 45 | sec | 45 | sec |
| Beaucage | 12.9 | 645 | μL | 100 | sec | 300 | sec | 300 | sec |

| | | | | | | |
|---|---|---|---|---|---|---|
| Acetonitrile | NA | 6.67 | mL | NA | NA | NA |

B. 0.2 μmol Synthesis Cycle ABI 394 Instrument

| | | | | | | | | | |
|---|---|---|---|---|---|---|---|---|---|
| Phosphoramidites | 15 | 31 | μL | 45 | sec | 233 | sec | 465 | sec |
| S-Ethyl Tetrazole | 38.7 | 31 | μL | 45 | sec | 233 | min | 465 | sec |
| Acetic Anhydride | 655 | 124 | μL | 5 | sec | 5 | sec | 5 | sec |
| N-Methyl | 1245 | 124 | μL | 5 | sec | 5 | sec | 5 | sec |
| Imidazole | | | | | | | | | |
| TCA | 700 | 732 | μL | 10 | sec | 10 | sec | 10 | sec |
| Iodine | 20.6 | 244 | μL | 15 | sec | 15 | sec | 15 | sec |
| Beaucage | 7.7 | 232 | μL | 100 | sec | 300 | sec | 300 | sec |

| | | | | | | |
|---|---|---|---|---|---|---|
| Acetonitrile | NA | 2.64 | mL | NA | NA | NA |

C. 0.2 μmol Synthesis Cycle 96 well Instrument

| | Equivalents: DNA/ | Amount: DNA/2′-O- | | | | Wait Time* 2′-O- | | | |
|---|---|---|---|---|---|---|---|---|---|
| Reagent | 2′-O-methyl/Ribo | methyl/Ribo | | Wait Time* DNA | | methyl | | Wait Time* Ribo | |
| Phosphoramidites | 22/33/66 | 40/60/120 | μL | 60 | sec | 180 | sec | 360 | sec |
| S-Ethyl Tetrazole | 70/105/210 | 40/60/120 | μL | 60 | sec | 180 | min | 360 | sec |
| Acetic Anhydride | 265/265/265 | 50/50/50 | μL | 10 | sec | 10 | sec | 10 | sec |
| N-Methyl | 502/502/502 | 50/50/50 | μL | 10 | sec | 10 | sec | 10 | sec |
| Imidazole | | | | | | | | | |
| TCA | 238/475/475 | 250/500/500 | μL | 15 | sec | 15 | sec | 15 | sec |
| Iodine | 6.8/6.8/6.8 | 80/80/80 | μL | 30 | sec | 30 | sec | 30 | sec |
| Beaucage | 34/51/51 | 80/120/120 | | 100 | sec | 200 | sec | 200 | sec |

| | | | | | | |
|---|---|---|---|---|---|---|
| Acetonitrile | NA | 1150/1150/1150 | μL | NA | NA | NA |

Wait time does not include contact time during delivery.
Tandem synthesis utilizes double coupling of linker molecule

What we claim is:

1. A a chemically synthesized double stranded nucleic acid molecule, wherein
(a) the double stranded nucleic acid molecule comprises a sense strand and an antisense strand;
(b) each strand of said double stranded nucleic acid molecule is 15 to 30 nucleotides in length;
(c) at least 15 nucleotides of the sense strand are complementary to the antisense strand
(d) the antisense strand of said double stranded nucleic acid molecule has complementarity to a Histone Deacetylase 11 (HDAC 11) target RNA;
(e) at least 20% of the internal nucleotides of each strand of said double stranded nucleic acid molecule comprises nucleosides having a chemical modification; and
(f) at least two of said chemical modifications are different from each other.

2. The double stranded nucleic acid molecule of claim 1, wherein said double stranded nucleic acid molecule comprises no ribonucleotides.

3. The double stranded nucleic acid molecule of claim 1, wherein said double stranded nucleic acid molecule comprises ribonucleotides.

4. The double stranded nucleic acid molecule of claim 1, wherein the two strands are connected via a linker molecule.

5. The double stranded nucleic acid molecule of claim 4, wherein said linker molecule is a polynucleotide linker.

6. The double stranded nucleic acid molecule of claim 4, wherein said linker molecule is a non-nucleotide linker.

7. The double stranded nucleic acid molecule of claim 1, wherein pyrimidine nucleotides in said sense strand are 2′-O-methyl pyrimidine nucleotides.

8. The double stranded nucleic acid molecule of claim 1, wherein purine nucleotides in said sense strand are 2′-deoxy purine nucleotides.

9. The double stranded nucleic acid molecule of claim 1, wherein pyrimidine nucleotides present in said sense strand are 2′-deoxy-2′-fluoro pyrimidine nucleotides.

10. The double stranded nucleic acid molecule of claim 1, wherein said sense strand has a terminal cap moiety at the 5′-end, the 3′-end, or both of the 5′ and 3′ ends.

11. The double stranded nucleic acid molecule of claim 10, wherein said terminal cap moiety is an inverted deoxy abasic moiety.

12. The double stranded nucleic acid molecule of claim 1, wherein pyrimidine nucleotides of said antisense strand are 2′-deoxy-2′-fluoro pyrimidine nucleotides.

13. The double stranded nucleic acid molecule of claim 1, wherein purine nucleotides of said antisense strand are 2′-O-methyl purine nucleotides.

14. The double stranded nucleic acid molecule of claim 1, wherein purine nucleotides present in said antisense strand comprise 2′-deoxy-purine nucleotides.

15. The double stranded nucleic acid molecule of claim 1, wherein said antisense strand comprises a phosphorothioate internucleotide linkage at the 3′ end.

16. The double stranded nucleic acid molecule of claim 1, wherein each of the two strands of said double stranded nucleic acid molecule is 21 nucleotides in length.

17. The double stranded nucleic acid molecule of claim 16, wherein at least two 3′ terminal nucleotides of each strand of the double stranded nucleic acid molecule are not base-paired to the nucleotides of the other strand of the double stranded nucleic acid molecule.

18. The double stranded nucleic acid molecule of claim 17, wherein each of the two 3′ terminal nucleotides of each strand of the double stranded nucleic acid molecule are 2′-deoxy-pyrimidines.

19. The double stranded nucleic acid molecule of claim 18, wherein said 2′-deoxy-pyrimidine is 2′-deoxythymidine.

20. The double stranded nucleic acid molecule of claim 16, wherein all 21 nucleotides of each strand of the double stranded nucleic acid molecule are base-paired to the complementary nucleotides of the other strand of the double stranded nucleic acid molecule.

21. The double stranded nucleic acid molecule of claim 16, wherein 19 nucleotides of the antisense strand are base-paired to the target HBV RNA.

22. The double stranded nucleic acid molecule of claim 16, wherein 21 nucleotides of the antisense strand are base-paired to the target HBV RNA.

23. The double stranded nucleic acid molecule of claim 1, wherein the 5′-end of the antisense strand includes a phosphate group.

24. The double stranded nucleic acid molecule of claim 1, wherein at least one of said chemical modifications is a 2′-sugar modification.

25. The double stranded nucleic acid molecule of claim 24, wherein said 2′-sugar modification is selected from the group consisting of 2′-H, 2′-O-alkyl, 2′-O—CF₃ and 2′-deoxy-2′-fluoro.

26. The double stranded nucleic acid molecule of claim 1, wherein at least 30% of the nucleotides of each strand has a chemical modification.

27. The double stranded nucleic acid molecule of claim 1, wherein at least 40% of the nucleotides of each strand has a chemical modification.

28. The double stranded nucleic acid molecule of claim 1, wherein at least 50% of the nucleotides of each strand has a chemical modification.

29. The double stranded nucleic acid molecule of claim 1, wherein said double stranded nucleic acid molecule is formulated as a lipid nucleic acid particle (LNP).

31. A composition comprising the double stranded nucleic acid molecule of claim 1 in a phamaceutically acceptable carrier or diluent.

The application's sequence listing, which the Patent Office published only in electronic form, follows.

SEQUENCE LISTING (5036 sequences)

SEQ ID NO: 1 - RNA, 19 nt, Artificial Sequence
  Synthetic
gcggagccgcgggcgggag

SEQ ID NO: 2 - RNA, 19 nt, Artificial Sequence
  Synthetic
gggcggacggaccgacuga

SEQ ID NO: 3 - RNA, 19 nt, Artificial Sequence
  Synthetic
acgguagggacgggaggcg

SEQ ID NO: 4 - RNA, 19 nt, Artificial Sequence
  Synthetic
gagcaagauggcgcagacg

SEQ ID NO: 5 - RNA, 19 nt, Artificial Sequence
  Synthetic
gcagggcacccggaggaaa

SEQ ID NO: 6 - RNA, 19 nt, Artificial Sequence
  Synthetic
agucuguuacuacuacgac

SEQ ID NO: 7 - RNA, 19 nt, Artificial Sequence
  Synthetic
cggggauguuggaaauuac

SEQ ID NO: 8 - RNA, 19 nt, Artificial Sequence
  Synthetic
cuauuauggacaaggccac

SEQ ID NO: 9 - RNA, 19 nt, Artificial Sequence
  Synthetic
cccaaugaagccucaccga

SEQ ID NO: 10 - RNA, 19 nt, Artificial Sequence
  Synthetic
aauccgcaugacucauaau

SEQ ID NO: 11 - RNA, 19 nt, Artificial Sequence
  Synthetic
uuugcugcucaacuauggu

SEQ ID NO: 12 - RNA, 19 nt, Artificial Sequence
  Synthetic
ucucuaccgaaaaauggaa

SEQ ID NO: 13 - RNA, 19 nt, Artificial Sequence
  Synthetic
aaucuaucgcccucacaaa

SEQ ID NO: 14 - RNA, 19 nt, Artificial Sequence
  Synthetic
agccaaugcugaggagaug

SEQ ID NO: 15 - RNA, 19 nt, Artificial Sequence
  Synthetic
gaccaaguaccacagcgau

SEQ ID NO: 16 - RNA, 19 nt, Artificial Sequence
  Synthetic
ugacuacauuaaauucuug

SEQ ID NO: 17 - RNA, 19 nt, Artificial Sequence
  Synthetic
gcgcuccauccguccagau

SEQ ID NO: 18 - RNA, 19 nt, Artificial Sequence
  Synthetic
uaacaugucggaguacagc

SEQ ID NO: 19 - RNA, 19 nt, Artificial Sequence
  Synthetic
caagcagaugcagagauuc

SEQ ID NO: 20 - RNA, 19 nt, Artificial Sequence
  Synthetic
caacguuggugaggacugu

SEQ ID NO: 21 - RNA, 19 nt, Artificial Sequence
  Synthetic
uccaguauucgauggccug

SEQ ID NO: 22 - RNA, 19 nt, Artificial Sequence
  Synthetic
guuugaguucugucaguug

SEQ ID NO: 23 - RNA, 19 nt, Artificial Sequence
  Synthetic
gucuacuggugguucugug

SEQ ID NO: 24 - RNA, 19 nt, Artificial Sequence
  Synthetic
ggcaagugcugugaaacuu

SEQ ID NO: 25 - RNA, 19 nt, Artificial Sequence
  Synthetic
uaauaagcagcagacggac

SEQ ID NO: 26 - RNA, 19 nt, Artificial Sequence
  Synthetic
caucgcugugaauugggcu

SEQ ID NO: 27 - RNA, 19 nt, Artificial Sequence
  Synthetic
ugggggccugcaccaugca

SEQ ID NO: 28 - RNA, 19 nt, Artificial Sequence
  Synthetic
aaagaaguccgaggcaucu

SEQ ID NO: 29 - RNA, 19 nt, Artificial Sequence
  Synthetic
uggcuucuguuacgucaau

SEQ ID NO: 30 - RNA, 19 nt, Artificial Sequence
  Synthetic
ugauaucgucuuggccauc

SEQ ID NO: 31 - RNA, 19 nt, Artificial Sequence
  Synthetic
ccuggaacugcuaaaguau

SEQ ID NO: 32 - RNA, 19 nt, Artificial Sequence
  Synthetic
ucaccagagggugcuguac

SEQ ID NO: 33 - RNA, 19 nt, Artificial Sequence
  Synthetic
cauugacauugauauucac

SEQ ID NO: 34 - RNA, 19 nt, Artificial Sequence
  Synthetic
ccauggugacggcguggaa

SEQ ID NO: 35 - RNA, 19 nt, Artificial Sequence
  Synthetic
agaggccuucuacaccacg

SEQ ID NO: 36 - RNA, 19 nt, Artificial Sequence
  Synthetic
ggaccgggucaugacugug

SEQ ID NO: 37 - RNA, 19 nt, Artificial Sequence
  Synthetic
guccuuucauaaguaugga

SEQ ID NO: 38 - RNA, 19 nt, Artificial Sequence
  Synthetic
agaguacuucccaggaacu

SEQ ID NO: 39 - RNA, 19 nt, Artificial Sequence
  Synthetic
uggggaccuacgggauauc

SEQ ID NO: 40 - RNA, 19 nt, Artificial Sequence
  Synthetic
cggggcuggcaaaggcaag

SEQ ID NO: 41 - RNA, 19 nt, Artificial Sequence
  Synthetic
guauuaugcuguuaacuac

SEQ ID NO: 42 - RNA, 19 nt, Artificial Sequence
  Synthetic
cccgcuccgagacgggauu

SEQ ID NO: 43 - RNA, 19 nt, Artificial Sequence
  Synthetic
ugaugacgaguccuaugag

SEQ ID NO: 44 - RNA, 19 nt, Artificial Sequence
  Synthetic
ggccauuuucaagccgguc

SEQ ID NO: 45 - RNA, 19 nt, Artificial Sequence
  Synthetic
cauguccaaaguaauggag

SEQ ID NO: 46 - RNA, 19 nt, Artificial Sequence
  Synthetic
gauguuccagccuagugcg

SEQ ID NO: 47 - RNA, 19 nt, Artificial Sequence
  Synthetic
gguggucuuacaguguggc

SEQ ID NO: 48 - RNA, 19 nt, Artificial Sequence
  Synthetic
cucagacucccuaucuggg

SEQ ID NO: 49 - RNA, 19 nt, Artificial Sequence
  Synthetic
ggaucgguuagguugcuuc

SEQ ID NO: 50 - RNA, 19 nt, Artificial Sequence
  Synthetic
caaucuaacuaucaaagga

SEQ ID NO: 51 - RNA, 19 nt, Artificial Sequence
  Synthetic
acacgccaaguguguggaa

SEQ ID NO: 52 - RNA, 19 nt, Artificial Sequence
  Synthetic
auuugucaagagcuuuaac

SEQ ID NO: 53 - RNA, 19 nt, Artificial Sequence
  Synthetic
ccugccuaugcugaugcug

SEQ ID NO: 54 - RNA, 19 nt, Artificial Sequence
  Synthetic
gggaggcggugguuacacc

SEQ ID NO: 55 - RNA, 19 nt, Artificial Sequence
  Synthetic
cauucguaacguugcccgg

SEQ ID NO: 56 - RNA, 19 nt, Artificial Sequence
  Synthetic
gugcuggacauaugagaca

SEQ ID NO: 57 - RNA, 19 nt, Artificial Sequence
  Synthetic
agcuguggcccuggauacg

SEQ ID NO: 58 - RNA, 19 nt, Artificial Sequence
  Synthetic
ggagaucccuaaugagcuu

SEQ ID NO: 59 - RNA, 19 nt, Artificial Sequence
  Synthetic
uccauacaaugacuacuuu

SEQ ID NO: 60 - RNA, 19 nt, Artificial Sequence
  Synthetic
ugaauacuuuggaccagau

SEQ ID NO: 61 - RNA, 19 nt, Artificial Sequence
  Synthetic
uuucaagcuccacaucagu

SEQ ID NO: 62 - RNA, 19 nt, Artificial Sequence
  Synthetic
uccuuccaauaugacuaac

SEQ ID NO: 63 - RNA, 19 nt, Artificial Sequence
  Synthetic
ccagaacacgaaugaguac

SEQ ID NO: 64 - RNA, 19 nt, Artificial Sequence
  Synthetic
ccuggagaagaucaaacag

SEQ ID NO: 65 - RNA, 19 nt, Artificial Sequence
  Synthetic
gcgacuguuugagaaccuu

SEQ ID NO: 66 - RNA, 19 nt, Artificial Sequence
  Synthetic
uagaaugcugccgcacgca

SEQ ID NO: 67 - RNA, 19 nt, Artificial Sequence
  Synthetic
accugggguccaaaugcag

SEQ ID NO: 68 - RNA, 19 nt, Artificial Sequence
  Synthetic
ggcgauuccugaggacgcc

SEQ ID NO: 69 - RNA, 19 nt, Artificial Sequence
  Synthetic
caucccugaggagaguggc

SEQ ID NO: 70 - RNA, 19 nt, Artificial Sequence
  Synthetic
cgaugaggacgaagacgac

SEQ ID NO: 71 - RNA, 19 nt, Artificial Sequence
  Synthetic
cccugacaagcgcaucucg

SEQ ID NO: 72 - RNA, 19 nt, Artificial Sequence
  Synthetic
gaucugcuccucugacaaa

SEQ ID NO: 73 - RNA, 19 nt, Artificial Sequence
  Synthetic
acgaauugccugugaggaa

SEQ ID NO: 74 - RNA, 19 nt, Artificial Sequence
  Synthetic
agaguucuccgauucugaa

SEQ ID NO: 75 - RNA, 19 nt, Artificial Sequence
  Synthetic
agaggagggagaggggggc

SEQ ID NO: 76 - RNA, 19 nt, Artificial Sequence
  Synthetic
ccgcaagaacucuuccaac

SEQ ID NO: 77 - RNA, 19 nt, Artificial Sequence
  Synthetic
cuucaaaaaagccaagaga

SEQ ID NO: 78 - RNA, 19 nt, Artificial Sequence
  Synthetic
agucaaaacagaggaugaa

SEQ ID NO: 79 - RNA, 19 nt, Artificial Sequence
  Synthetic
aaaagagaaagacccagag

SEQ ID NO: 80 - RNA, 19 nt, Artificial Sequence
  Synthetic
ggagaagaaagaagucacc

SEQ ID NO: 81 - RNA, 19 nt, Artificial Sequence
  Synthetic
cgaagaggagaaaaccaag

SEQ ID NO: 82 - RNA, 19 nt, Artificial Sequence
  Synthetic
ggaggagaagccagaagcc

SEQ ID NO: 83 - RNA, 19 nt, Artificial Sequence
  Synthetic
caaaggggucaaggaggag

SEQ ID NO: 84 - RNA, 19 nt, Artificial Sequence
  Synthetic
ggucaaguuggccugaaug

SEQ ID NO: 85 - RNA, 19 nt, Artificial Sequence
  Synthetic
ggaccucuccagcucuggc

SEQ ID NO: 86 - RNA, 19 nt, Artificial Sequence
  Synthetic
cuuccugcugagucccuca

SEQ ID NO: 87 - RNA, 19 nt, Artificial Sequence
  Synthetic
acguuucuuccccaacccc

SEQ ID NO: 88 - RNA, 19 nt, Artificial Sequence
  Synthetic
cucagauuuuauauuuucu

SEQ ID NO: 89 - RNA, 19 nt, Artificial Sequence
  Synthetic
uauuucucuguguauuuau

SEQ ID NO: 90 - RNA, 19 nt, Artificial Sequence
  Synthetic
uauaaaaauuuauuaaaua

SEQ ID NO: 91 - RNA, 19 nt, Artificial Sequence
  Synthetic
auaaauauccccagggaca

SEQ ID NO: 92 - RNA, 19 nt, Artificial Sequence
  Synthetic
agaaaccaaggccccgagc

SEQ ID NO: 93 - RNA, 19 nt, Artificial Sequence
  Synthetic
cucagggcagcugugcugg

SEQ ID NO: 94 - RNA, 19 nt, Artificial Sequence
  Synthetic
ggugagcucuuccaggagc

SEQ ID NO: 95 - RNA, 19 nt, Artificial Sequence
  Synthetic
ccaccuugccacccauucu

SEQ ID NO: 96 - RNA, 19 nt, Artificial Sequence
  Synthetic
uucccguucuuaacuuuga

SEQ ID NO: 97 - RNA, 19 nt, Artificial Sequence
  Synthetic
aaccauaaagggugccagg

SEQ ID NO: 98 - RNA, 19 nt, Artificial Sequence
  Synthetic
gucugggugaaagggauac

SEQ ID NO: 99 - RNA, 19 nt, Artificial Sequence
  Synthetic
cuuuuaugcaaccauaaga

SEQ ID NO: 100 - RNA, 19 nt, Artificial Sequence
  Synthetic
acaaacuccugaaaugcca

SEQ ID NO: 101 - RNA, 19 nt, Artificial Sequence
  Synthetic
aagugccugcuuaguagcu

SEQ ID NO: 102 - RNA, 19 nt, Artificial Sequence
  Synthetic
uuuggaaaggugcccuuau

SEQ ID NO: 103 - RNA, 19 nt, Artificial Sequence
  Synthetic
uugaacauucuagaagggg

SEQ ID NO: 104 - RNA, 19 nt, Artificial Sequence
  Synthetic
guggcugggucuucaagga

SEQ ID NO: 105 - RNA, 19 nt, Artificial Sequence
  Synthetic
aucuccuguuuuuuucagg

SEQ ID NO: 106 - RNA, 19 nt, Artificial Sequence
  Synthetic
gcuccuaaaguaacaucag

SEQ ID NO: 107 - RNA, 19 nt, Artificial Sequence
  Synthetic
gccauuuuuagauugguuc

SEQ ID NO: 108 - RNA, 19 nt, Artificial Sequence
  Synthetic
cuguuuucguaccuuccca

SEQ ID NO: 109 - RNA, 19 nt, Artificial Sequence
  Synthetic
acuggccucaagugagcca

SEQ ID NO: 110 - RNA, 19 nt, Artificial Sequence
  Synthetic
aagaaacacugccugcccu

SEQ ID NO: 111 - RNA, 19 nt, Artificial Sequence
  Synthetic
ucugucugucuucuccuaa

SEQ ID NO: 112 - RNA, 19 nt, Artificial Sequence
  Synthetic
auucugcagguggagguug

SEQ ID NO: 113 - RNA, 19 nt, Artificial Sequence
  Synthetic
gcuagucuaguuuccuuuu

SEQ ID NO: 114 - RNA, 19 nt, Artificial Sequence
  Synthetic
uugagauacuauuuucauu

SEQ ID NO: 115 - RNA, 19 nt, Artificial Sequence
  Synthetic
uuuugugagccucuuugua

SEQ ID NO: 116 - RNA, 19 nt, Artificial Sequence
  Synthetic
cucccgcccgcggcuccgc

SEQ ID NO: 117 - RNA, 19 nt, Artificial Sequence
  Synthetic
ucagucgguccguccgccc

SEQ ID NO: 118 - RNA, 19 nt, Artificial Sequence
  Synthetic
cgccucccgucccuaccgu

SEQ ID NO: 119 - RNA, 19 nt, Artificial Sequence
  Synthetic
cgucugcgccaucuugcuc

SEQ ID NO: 120 - RNA, 19 nt, Artificial Sequence
  Synthetic
uuuccuccgggugcccugc

SEQ ID NO: 121 - RNA, 19 nt, Artificial Sequence
  Synthetic
gucguaguaguaacagacu

SEQ ID NO: 122 - RNA, 19 nt, Artificial Sequence
  Synthetic
guaauuuccaacauccccg

SEQ ID NO: 123 - RNA, 19 nt, Artificial Sequence
  Synthetic
guggccuuguccauaauag

SEQ ID NO: 124 - RNA, 19 nt, Artificial Sequence
  Synthetic
ucggugaggcuucauuggg

SEQ ID NO: 125 - RNA, 19 nt, Artificial Sequence
  Synthetic
auuaugagucaugcggauu

SEQ ID NO: 126 - RNA, 19 nt, Artificial Sequence
  Synthetic
accauaguugagcagcaaa

SEQ ID NO: 127 - RNA, 19 nt, Artificial Sequence
  Synthetic
uuccauuuuucgguagaga

SEQ ID NO: 128 - RNA, 19 nt, Artificial Sequence
  Synthetic
uuugugagggcgauagauu

SEQ ID NO: 129 - RNA, 19 nt, Artificial Sequence
  Synthetic
caucuccucagcauuggcu

SEQ ID NO: 130 - RNA, 19 nt, Artificial Sequence
  Synthetic
aucgcugugguacuugguc

SEQ ID NO: 131 - RNA, 19 nt, Artificial Sequence
  Synthetic
caagaauuuaauguaguca

SEQ ID NO: 132 - RNA, 19 nt, Artificial Sequence
  Synthetic
aucuggacggauggagcgc

SEQ ID NO: 133 - RNA, 19 nt, Artificial Sequence
  Synthetic
gcuguacuccgacauguua

SEQ ID NO: 134 - RNA, 19 nt, Artificial Sequence
  Synthetic
gaaucucugcaucugcuug

SEQ ID NO: 135 - RNA, 19 nt, Artificial Sequence
  Synthetic
acaguccucaccaacguug

SEQ ID NO: 136 - RNA, 19 nt, Artificial Sequence
  Synthetic
caggccaucgaauacugga

SEQ ID NO: 137 - RNA, 19 nt, Artificial Sequence
  Synthetic
caacugacagaacucaaac

SEQ ID NO: 138 - RNA, 19 nt, Artificial Sequence
  Synthetic
cacagaaccaccaguagac

SEQ ID NO: 139 - RNA, 19 nt, Artificial Sequence
  Synthetic
aaguuucacagcacuugcc

SEQ ID NO: 140 - RNA, 19 nt, Artificial Sequence
  Synthetic
guccgucugcugcuuauua

SEQ ID NO: 141 - RNA, 19 nt, Artificial Sequence
  Synthetic
agcccaauucacagcgaug

SEQ ID NO: 142 - RNA, 19 nt, Artificial Sequence
  Synthetic
ugcauggugcaggccccca

SEQ ID NO: 143 - RNA, 19 nt, Artificial Sequence
  Synthetic
agaugccucggacuucuuu

SEQ ID NO: 144 - RNA, 19 nt, Artificial Sequence
  Synthetic
auugacguaacagaagcca

SEQ ID NO: 145 - RNA, 19 nt, Artificial Sequence
  Synthetic
gauggccaagacgauauca

SEQ ID NO: 146 - RNA, 19 nt, Artificial Sequence
  Synthetic
auacuuuagcaguuccagg

SEQ ID NO: 147 - RNA, 19 nt, Artificial Sequence
  Synthetic
guacagcacccucugguga

SEQ ID NO: 148 - RNA, 19 nt, Artificial Sequence
  Synthetic
gugaauaucaaugucaaug

SEQ ID NO: 149 - RNA, 19 nt, Artificial Sequence
  Synthetic
uuccacgccgucaccaugg

SEQ ID NO: 150 - RNA, 19 nt, Artificial Sequence
  Synthetic
cgugguguagaaggccucu

SEQ ID NO: 151 - RNA, 19 nt, Artificial Sequence
  Synthetic
cacagucaugacccggucc

SEQ ID NO: 152 - RNA, 19 nt, Artificial Sequence
  Synthetic
uccauacuuaugaaaggac

SEQ ID NO: 153 - RNA, 19 nt, Artificial Sequence
  Synthetic
aguuccugggaaguacucu

SEQ ID NO: 154 - RNA, 19 nt, Artificial Sequence
  Synthetic
gauaucccguaggucccca

SEQ ID NO: 155 - RNA, 19 nt, Artificial Sequence
  Synthetic
cuugccuuugccagccccg

SEQ ID NO: 156 - RNA, 19 nt, Artificial Sequence
  Synthetic
guaguuaacagcauaauac

SEQ ID NO: 157 - RNA, 19 nt, Artificial Sequence
  Synthetic
aaucccgucucggagcggg

SEQ ID NO: 158 - RNA, 19 nt, Artificial Sequence
  Synthetic
cucauaggacucgucauca

SEQ ID NO: 159 - RNA, 19 nt, Artificial Sequence
  Synthetic
gaccggcuugaaaauggcc

SEQ ID NO: 160 - RNA, 19 nt, Artificial Sequence
  Synthetic
cuccauuacuuuggacaug

SEQ ID NO: 161 - RNA, 19 nt, Artificial Sequence
  Synthetic
cgcacuaggcuggaacauc

SEQ ID NO: 162 - RNA, 19 nt, Artificial Sequence
  Synthetic
gccacacuguaagaccacc

SEQ ID NO: 163 - RNA, 19 nt, Artificial Sequence
  Synthetic
cccagauagggagucugag

SEQ ID NO: 164 - RNA, 19 nt, Artificial Sequence
  Synthetic
gaagcaaccuaaccgaucc

SEQ ID NO: 165 - RNA, 19 nt, Artificial Sequence
  Synthetic
uccuuugauaguuagauug

SEQ ID NO: 166 - RNA, 19 nt, Artificial Sequence
  Synthetic
uuccacacacuuggcgugu

SEQ ID NO: 167 - RNA, 19 nt, Artificial Sequence
  Synthetic
guuaaagcucuugacaaau

SEQ ID NO: 168 - RNA, 19 nt, Artificial Sequence
  Synthetic
cagcaucagcauaggcagg

SEQ ID NO: 169 - RNA, 19 nt, Artificial Sequence
  Synthetic
gguguaaccaccgccuccc

SEQ ID NO: 170 - RNA, 19 nt, Artificial Sequence
  Synthetic
ccgggcaacguuacgaaug

SEQ ID NO: 171 - RNA, 19 nt, Artificial Sequence
  Synthetic
ugucucauauguccagcac

SEQ ID NO: 172 - RNA, 19 nt, Artificial Sequence
  Synthetic
cguauccagggccacagcu

SEQ ID NO: 173 - RNA, 19 nt, Artificial Sequence
  Synthetic
aagcucauuagggaucucc

SEQ ID NO: 174 - RNA, 19 nt, Artificial Sequence
  Synthetic
aaaguagucauuguaugga

SEQ ID NO: 175 - RNA, 19 nt, Artificial Sequence
  Synthetic
aucugguccaaaguauuca

SEQ ID NO: 176 - RNA, 19 nt, Artificial Sequence
  Synthetic
acugauguggagcuugaaa

SEQ ID NO: 177 - RNA, 19 nt, Artificial Sequence
  Synthetic
guuagucauauuggaagga

SEQ ID NO: 178 - RNA, 19 nt, Artificial Sequence
  Synthetic
guacucauucguguucugg

SEQ ID NO: 179 - RNA, 19 nt, Artificial Sequence
  Synthetic
cuguuugaucuucuccagg

SEQ ID NO: 180 - RNA, 19 nt, Artificial Sequence
  Synthetic
aagguucucaaacagucgc

SEQ ID NO: 181 - RNA, 19 nt, Artificial Sequence
  Synthetic
ugcgugcggcagcauucua

SEQ ID NO: 182 - RNA, 19 nt, Artificial Sequence
  Synthetic
cugcauuuggaccccaggu

SEQ ID NO: 183 - RNA, 19 nt, Artificial Sequence
  Synthetic
ggcguccucaggaaucgcc

SEQ ID NO: 184 - RNA, 19 nt, Artificial Sequence
  Synthetic
gccacucuccucagggaug

SEQ ID NO: 185 - RNA, 19 nt, Artificial Sequence
  Synthetic
gucgucuucguccucaucg

SEQ ID NO: 186 - RNA, 19 nt, Artificial Sequence
  Synthetic
cgagaugcgcuugucaggg

SEQ ID NO: 187 - RNA, 19 nt, Artificial Sequence
  Synthetic
uuugucagaggagcagauc

SEQ ID NO: 188 - RNA, 19 nt, Artificial Sequence
  Synthetic
uuccucacaggcaauucgu

SEQ ID NO: 189 - RNA, 19 nt, Artificial Sequence
  Synthetic
uucagaaucggagaacucu

SEQ ID NO: 190 - RNA, 19 nt, Artificial Sequence
  Synthetic
gccccccucucccuccucu

SEQ ID NO: 191 - RNA, 19 nt, Artificial Sequence
  Synthetic
guuggaagaguucuugcgg

SEQ ID NO: 192 - RNA, 19 nt, Artificial Sequence
  Synthetic
ucucuuggcuuuuuugaag

SEQ ID NO: 193 - RNA, 19 nt, Artificial Sequence
  Synthetic
uucauccucuguuuugacu

SEQ ID NO: 194 - RNA, 19 nt, Artificial Sequence
  Synthetic
cucugggucuuucucuuuu

SEQ ID NO: 195 - RNA, 19 nt, Artificial Sequence
  Synthetic
ggugacuucuuucuucucc

SEQ ID NO: 196 - RNA, 19 nt, Artificial Sequence
  Synthetic
cuugguuuucuccucuucg

SEQ ID NO: 197 - RNA, 19 nt, Artificial Sequence
  Synthetic
ggcuucuggcuucuccucc

SEQ ID NO: 198 - RNA, 19 nt, Artificial Sequence
  Synthetic
cuccuccuugaccccuuug

SEQ ID NO: 199 - RNA, 19 nt, Artificial Sequence
  Synthetic
cauucaggccaacuugacc

SEQ ID NO: 200 - RNA, 19 nt, Artificial Sequence
  Synthetic
gccagagcuggagaggucc

SEQ ID NO: 201 - RNA, 19 nt, Artificial Sequence
  Synthetic
ugagggacucagcaggaag

SEQ ID NO: 202 - RNA, 19 nt, Artificial Sequence
  Synthetic
gggguuggggaagaaacgu

SEQ ID NO: 203 - RNA, 19 nt, Artificial Sequence
  Synthetic
agaaaauauaaaaucugag

SEQ ID NO: 204 - RNA, 19 nt, Artificial Sequence
  Synthetic
auaaauacacagagaaaua

SEQ ID NO: 205 - RNA, 19 nt, Artificial Sequence
  Synthetic
uauuuaauaaauuuuuaua

SEQ ID NO: 206 - RNA, 19 nt, Artificial Sequence
  Synthetic
ugucccuggggauauuuau

SEQ ID NO: 207 - RNA, 19 nt, Artificial Sequence
  Synthetic
gcucggggccuugguuucu

SEQ ID NO: 208 - RNA, 19 nt, Artificial Sequence
  Synthetic
ccagcacagcugcccugag

SEQ ID NO: 209 - RNA, 19 nt, Artificial Sequence
  Synthetic
gcuccuggaagagcucacc

SEQ ID NO: 210 - RNA, 19 nt, Artificial Sequence
  Synthetic
agaauggguggcaaggugg

SEQ ID NO: 211 - RNA, 19 nt, Artificial Sequence
  Synthetic
ucaaaguuaagaacgggaa

SEQ ID NO: 212 - RNA, 19 nt, Artificial Sequence
  Synthetic
ccuggcacccuuuaugguu

SEQ ID NO: 213 - RNA, 19 nt, Artificial Sequence
  Synthetic
guaucccuuucacccagac

SEQ ID NO: 214 - RNA, 19 nt, Artificial Sequence
  Synthetic
ucuuaugguugcauaaaag

SEQ ID NO: 215 - RNA, 19 nt, Artificial Sequence
  Synthetic
uggcauuucaggaguuugu

SEQ ID NO: 216 - RNA, 19 nt, Artificial Sequence
  Synthetic
agcuacuaagcaggcacuu

SEQ ID NO: 217 - RNA, 19 nt, Artificial Sequence
  Synthetic
auaagggcaccuuuccaaa

SEQ ID NO: 218 - RNA, 19 nt, Artificial Sequence
  Synthetic
ccccuucuagaauguucaa

SEQ ID NO: 219 - RNA, 19 nt, Artificial Sequence
  Synthetic
uccuugaagacccagccac

SEQ ID NO: 220 - RNA, 19 nt, Artificial Sequence
  Synthetic
ccugaaaaaaacaggagau

SEQ ID NO: 221 - RNA, 19 nt, Artificial Sequence
  Synthetic
cugauguuacuuuaggagc

SEQ ID NO: 222 - RNA, 19 nt, Artificial Sequence
  Synthetic
gaaccaaucuaaaaauggc

SEQ ID NO: 223 - RNA, 19 nt, Artificial Sequence
  Synthetic
ugggaagguacgaaaacag

SEQ ID NO: 224 - RNA, 19 nt, Artificial Sequence
  Synthetic
uggcucacuugaggccagu

SEQ ID NO: 225 - RNA, 19 nt, Artificial Sequence
  Synthetic
agggcaggcaguguuucuu

SEQ ID NO: 226 - RNA, 19 nt, Artificial Sequence
  Synthetic
uuaggagaagacagacaga

SEQ ID NO: 227 - RNA, 19 nt, Artificial Sequence
  Synthetic
caaccuccaccugcagaau

SEQ ID NO: 228 - RNA, 19 nt, Artificial Sequence
  Synthetic
aaaaggaaacuagacuagc

SEQ ID NO: 229 - RNA, 19 nt, Artificial Sequence
  Synthetic
aaugaaaauaguaucucaa

SEQ ID NO: 230 - RNA, 19 nt, Artificial Sequence
  Synthetic
uacaaagaggcucacaaaa

SEQ ID NO: 231 - RNA, 23 nt, Artificial Sequence
  Synthetic
ccgcuccgagacgggauugauga

SEQ ID NO: 232 - RNA, 23 nt, Artificial Sequence
  Synthetic
caggcuccuaaaguaacaucagc

SEQ ID NO: 233 - RNA, 23 nt, Artificial Sequence
  Synthetic
uagauugguucuguuuucguacc

SEQ ID NO: 234 - RNA, 23 nt, Artificial Sequence
  Synthetic
cccgcuccgagacgggauugaug

SEQ ID NO: 235 - RNA, 23 nt, Artificial Sequence
  Synthetic
ggcggugguuacaccauucguaa

SEQ ID NO: 236 - RNA, 23 nt, Artificial Sequence
  Synthetic
cccguucuuaacuuugaaccaua

SEQ ID NO: 237 - RNA, 23 nt, Artificial Sequence
  Synthetic
cggaccgacugacgguagggacg

SEQ ID NO: 238 - RNA, 23 nt, Artificial Sequence
  Synthetic
uacccgcuccgagacgggauuga

SEQ ID NO: 239 - DNA, 21 bp, Artificial Sequence
  Synthetic
  misc_feature (1)..(19): ribonucleic acid.
gcuccgagacgggauugautt

SEQ ID NO: 240 - DNA, 21 bp, Artificial Sequence
  Synthetic
  misc_feature (1)..(19): ribonucleic acid.
ggcuccuaaaguaacaucatt

SEQ ID NO: 241 - DNA, 21 bp, Artificial Sequence
  Synthetic
  misc_feature (1)..(19): ribonucleic acid.
gauugguucuguuuucguatt

SEQ ID NO: 242 - DNA, 21 bp, Artificial Sequence
  Synthetic
  misc_feature (1)..(19): ribonucleic acid.
cgcuccgagacgggauugatt

SEQ ID NO: 243 - DNA, 21 bp, Artificial Sequence
  Synthetic
  misc_feature (1)..(19): ribonucleic acid.
cggugguuacaccauucgutt

SEQ ID NO: 244 - DNA, 21 bp, Artificial Sequence
  Synthetic
  misc_feature (1)..(19): ribonucleic acid.
cguucuuaacuuugaaccatt

SEQ ID NO: 245 - DNA, 21 bp, Artificial Sequence
  Synthetic
  misc_feature (1)..(19): ribonucleic acid.
gaccgacugacgguagggatt

SEQ ID NO: 246 - DNA, 21 bp, Artificial Sequence
  Synthetic
  misc_feature (1)..(19): ribonucleic acid.
cccgcuccgagacgggauutt

SEQ ID NO: 247 - DNA, 21 bp, Artificial Sequence
  Synthetic
  misc_feature (1)..(19): ribonucleic acid.
aucaaucccgucucggagctt

SEQ ID NO: 248 - DNA, 21 bp, Artificial Sequence
  Synthetic
  misc_feature (1)..(19): ribonucleic acid.
ugauguuacuuuaggagcctt

SEQ ID NO: 249 - DNA, 21 bp, Artificial Sequence
  Synthetic
  misc_feature (1)..(19): ribonucleic acid.
uacgaaaacagaaccaauctt

SEQ ID NO: 250 - DNA, 21 bp, Artificial Sequence
  Synthetic
  misc_feature (1)..(19): ribonucleic acid.
ucaaucccgucucggagcgtt

SEQ ID NO: 251 - DNA, 21 bp, Artificial Sequence
  Synthetic
  misc_feature (1)..(19): ribonucleic acid.
acgaaugguguaaccaccgtt

SEQ ID NO: 252 - DNA, 21 bp, Artificial Sequence
  Synthetic
  misc_feature (1)..(19): ribonucleic acid.
ugguucaaaguuaagaacgtt

SEQ ID NO: 253 - DNA, 21 bp, Artificial Sequence
  Synthetic
  misc_feature (1)..(19): ribonucleic acid.
ucccuaccgucagucgguctt

SEQ ID NO: 254 - DNA, 21 bp, Artificial Sequence
  Synthetic
  misc_feature (1)..(19): ribonucleic acid.
aaucccgucucggagcgggtt

SEQ ID NO: 255 - DNA, 21 bp, Artificial Sequence
  Synthetic
  misc_feature (1)..(1): 5'-3 attached inverted deoxyabasic moiety.
  misc_feature (2)..(5): 2'-deoxy-2'-fluoro
  misc_feature (10)..(10): 2'-deoxy-2'-fluoro
  misc_feature (15)..(16): 2'-deoxy-2'-fluoro
  misc_feature (19)..(19): 2'-deoxy-2'-fluoro
  misc_feature (21)..(21): 3'-3 attached inverted deoxyabasic moiety.
gcuccgagacgggauugautt

SEQ ID NO: 256 - DNA, 21 bp, Artificial Sequence
  Synthetic
  misc_feature (1)..(1): 5'-3 attached inverted deoxyabasic moiety.
  misc_feature (3)..(7): 2'-deoxy-2'-fluoro
  misc_feature (12)..(12): 2'-deoxy-2'-fluoro
  misc_feature (15)..(15): 2'-deoxy-2'-fluoro
  misc_feature (17)..(18): 2'-deoxy-2'-fluoro
  misc_feature (21)..(21): 3'-3 attached inverted deoxyabasic moiety.
ggcuccuaaaguaacaucatt

SEQ ID NO: 257 - DNA, 21 bp, Artificial Sequence
  Synthetic
  misc_feature (1)..(1): 5'-3 attached inverted deoxyabasic moiety.
  misc_feature (3)..(4): 2'-deoxy-2'-fluoro
  misc_feature (7)..(10): 2'-deoxy-2'-fluoro
  misc_feature (12)..(16): 2'-deoxy-2'-fluoro
  misc_feature (18)..(18): 2'-deoxy-2'-fluoro
  misc_feature (21)..(21): 3'-3 attached inverted deoxyabasic moiety.
gauugguucuguuuucguatt

SEQ ID NO: 258 - DNA, 21 bp, Artificial Sequence
  Synthetic
  misc_feature (1)..(1): 5'-3 attached inverted deoxyabasic moiety.
  misc_feature (1)..(1): 2'-deoxy-2'-fluoro
  misc_feature (3)..(6): 2'-deoxy-2'-fluoro
  misc_feature (11)..(11): 2'-deoxy-2'-fluoro
  misc_feature (16)..(17): 2'-deoxy-2'-fluoro
  misc_feature (21)..(21): 3'-3 attached inverted deoxyabasic moiety.
cgcuccgagacgggauugatt

SEQ ID NO: 259 - DNA, 21 bp, Artificial Sequence
  Synthetic
  misc_feature (1)..(1): 5'-3 attached inverted deoxyabasic moiety.
  misc_feature (1)..(1): 2'-deoxy-2'-fluoro
  misc_feature (4)..(4): 2'-deoxy-2'-fluoro
  misc_feature (7)..(8): 2'-deoxy-2'-fluoro
  misc_feature (10)..(10): 2'-deoxy-2'-fluoro
  misc_feature (12)..(13): 2'-deoxy-2'-fluoro
  misc_feature (15)..(17): 2'-deoxy-2'-fluoro
  misc_feature (19)..(19): 2'-deoxy-2'-fluoro
  misc_feature (21)..(21): 5'-3 attached inverted deoxyabasic moiety.
cggugguuacaccauucgutt

SEQ ID NO: 260 - DNA, 21 bp, Artificial Sequence
  Synthetic
  misc_feature (1)..(1): 5'-3 attached inverted deoxyabasic moiety.
  misc_feature (1)..(1): 2'-deoxy-2'-fluoro
  misc_feature (3)..(7): 2'-deoxy-2'-fluoro
  misc_feature (10)..(13): 2'-deoxy-2'-fluoro
  misc_feature (17)..(18): 2'-deoxy-2'-fluoro
  misc_feature (21)..(21): 3'-3 attached inverted deoxyabasic moiety.
cguucuuaacuuugaaccatt

SEQ ID NO: 261 - DNA, 21 bp, Artificial Sequence
  Synthetic
  misc_feature (1)..(1): 5'-3 attached inverted deoxyabasic moiety.
  misc_feature (3)..(4): 2'-deoxy-2'-fluoro
  misc_feature (7)..(8): 2'-deoxy-2'-fluoro
  misc_feature (11)..(11): 2'-deoxy-2'-fluoro
  misc_feature (14)..(14): 2'-deoxy-2'-fluoro
  misc_feature (21)..(21): 5'-3 attached inverted deoxyabasic moiety.
gaccgacugacgguagggatt

SEQ ID NO: 262 - DNA, 21 bp, Artificial Sequence
  Synthetic
  misc_feature (1)..(1): 5'-3 attached inverted deoxyabasic moiety.
  misc_feature (1)..(3): 2'-deoxy-2'-fluoro
  misc_feature (5)..(8): 2'-deoxy-2'-fluoro
  misc_feature (13)..(13): 2'-deoxy-2'-fluoro
  misc_feature (18)..(19): 2'-deoxy-2'-fluoro
  misc_feature (21)..(21): 3'-3 attached inverted deoxyabasic moiety.
cccgcuccgagacgggauutt

SEQ ID NO: 263 - DNA, 21 bp, Artificial Sequence
  Synthetic
  misc_feature (2)..(3): 2'-deoxy-2'-fluoro
  misc_feature (6)..(9): 2'-deoxy-2'-fluoro
  misc_feature (11)..(14): 2'-deoxy-2'-fluoro
  misc_feature (19)..(19): 2'-deoxy-2'-fluoro
  misc_feature (20)..(21): phosphorothioate linkage
aucaaucccgucucggagctt

SEQ ID NO: 264 - DNA, 21 bp, Artificial Sequence
  Synthetic
  misc_feature (1)..(1): 2'-deoxy-2'-fluoro
  misc_feature (4)..(4): 2'-deoxy-2'-fluoro
  misc_feature (5)..(6): 2'-deoxy-2'-fluoro
  misc_feature (9)..(12): 2'-deoxy-2'-fluoro
  misc_feature (18)..(19): 2'-deoxy-2'-fluoro
  misc_feature (20)..(21): phosphorothioate linkage
ugauguuacuuuaggagcctt

SEQ ID NO: 265 - DNA, 21 bp, Artificial Sequence
  Synthetic
  misc_feature (1)..(1): 2'-deoxy-2'-fluoro
  misc_feature (3)..(3): 2'-deoxy-2'-fluoro
  misc_feature (9)..(9): 2'-deoxy-2'-fluoro
  misc_feature (14)..(15): 2'-deoxy-2'-fluoro
  misc_feature (18)..(19): 2'-deoxy-2'-fluoro
  misc_feature (20)..(21): phosphorothioate linkage
uacgaaaacagaaccaauctt

SEQ ID NO: 266 - DNA, 21 bp, Artificial Sequence
  Synthetic
  misc_feature (1)..(2): 2'-deoxy-2'-fluoro
  misc_feature (5)..(8): 2'-deoxy-2'-fluoro
  misc_feature (10)..(13): 2'-deoxy-2'-fluoro
  misc_feature (18)..(18): 2'-deoxy-2'-fluoro
  misc_feature (20)..(21): phosphorothioate linkage
ucaaucccgucucggagcgtt

SEQ ID NO: 267 - DNA, 21 bp, Artificial Sequence
  Synthetic
  misc_feature (2)..(2): 2'-deoxy-2'-fluoro
  misc_feature (6)..(6): 2'-deoxy-2'-fluoro
  misc_feature (9)..(9): 2'-deoxy-2'-fluoro
  misc_feature (11)..(11): 2'-deoxy-2'-fluoro
  misc_feature (14)..(15): 2'-deoxy-2'-fluoro
  misc_feature (17)..(18): 2'-deoxy-2'-fluoro
  misc_feature (20)..(21): phosphorothioate linkage
acgaaugguguaaccaccgtt

SEQ ID NO: 268 - DNA, 21 bp, Artificial Sequence
  Synthetic
  misc_feature (1)..(1): 2'-deoxy-2'-fluoro
  misc_feature (4)..(6): 2'-deoxy-2'-fluoro
  misc_feature (11)..(12): 2'-deoxy-2'-fluoro
  misc_feature (18)..(18): 2'-deoxy-2'-fluoro
  misc_feature (20)..(21): phosphorothioate linkage
ugguucaaaguuaagaacgtt

SEQ ID NO: 269 - DNA, 21 bp, Artificial Sequence
  Synthetic
  misc_feature (1)..(5): 2'-deoxy-2'-fluoro
  misc_feature (7)..(8): 2'-deoxy-2'-fluoro
  misc_feature (10)..(11): 2'-deoxy-2'-fluoro
  misc_feature (14)..(15): 2'-deoxy-2'-fluoro
  misc_feature (18)..(19): 2'-deoxy-2'-fluoro
  misc_feature (20)..(21): phosphorothioate linkage
ucccuaccgucagucgguctt

SEQ ID NO: 270 - DNA, 21 bp, Artificial Sequence
  Synthetic
  misc_feature (3)..(6): 2'-deoxy-2'-fluoro
  misc_feature (8)..(11): 2'-deoxy-2'-fluoro
  misc_feature (16)..(16): 2'-deoxy-2'-fluoro
  misc_feature (20)..(21): phosphorothioate linkage
aaucccgucucggagcgggtt

SEQ ID NO: 271 - DNA, 21 bp, Artificial Sequence
  Synthetic
  misc_feature (1)..(1): 5'-3 attached inverted deoxyabasic moiety.
  misc_feature (1)..(1): deoxy
  misc_feature (2)..(5): 2'-deoxy-2'-fluoro
  misc_feature (6)..(9): deoxy
  misc_feature (10)..(10): 2'-deoxy-2'-fluoro
  misc_feature (11)..(14): deoxy
  misc_feature (15)..(16): 2'-deoxy-2'-fluoro
  misc_feature (17)..(18): deoxy
  misc_feature (19)..(19): 2'-deoxy-2'-fluoro
  misc_feature (21)..(21): 3'-3 attached inverted deoxyabasic moiety.
gcuccgagacgggauugautt

SEQ ID NO: 272 - DNA, 21 bp, Artificial Sequence
  Synthetic
  misc_feature (1)..(1): 5'-3 attached inverted deoxyabasic moiety.
  misc_feature (1)..(2): deoxy
  misc_feature (3)..(7): 2'-deoxy-2'-fluoro
  misc_feature (8)..(11): deoxy
  misc_feature (12)..(12): 2'-deoxy-2'-fluoro
  misc_feature (13)..(14): deoxy
  misc_feature (15)..(15): 2'-deoxy-2'-fluoro
  misc_feature (16)..(16): deoxy
  misc_feature (17)..(18): 2'-deoxy-2'-fluoro
  misc_feature (19)..(19): deoxy
  misc_feature (21)..(21): 3'-3 attached inverted deoxyabasic moiety.
ggcuccuaaaguaacaucatt

SEQ ID NO: 273 - DNA, 21 bp, Artificial Sequence
  Synthetic
  misc_feature (1)..(1): 5'-3 attached inverted deoxyabasic moiety.
  misc_feature (1)..(2): deoxy
  misc_feature (3)..(4): 2'-deoxy-2'-fluoro
  misc_feature (5)..(6): deoxy
  misc_feature (7)..(10): 2'-deoxy-2'-fluoro
  misc_feature (11)..(11): deoxy
  misc_feature (12)..(16): 2'-deoxy-2'-fluoro
  misc_feature (17)..(17): deoxy
  misc_feature (18)..(18): 2'-deoxy-2'-fluoro
  misc_feature (19)..(19): deoxy
  misc_feature (21)..(21): 3'-3 attached inverted deoxyabasic moiety.
gauugguucuguuuucguatt

SEQ ID NO: 274 - DNA, 21 bp, Artificial Sequence
  Synthetic
  misc_feature (1)..(1): 5'-3 attached inverted deoxyabasic moiety.
  misc_feature (1)..(1): 2'-deoxy-2'-fluoro
  misc_feature (2)..(2): deoxy
  misc_feature (3)..(6): 2'-deoxy-2'-fluoro
  misc_feature (7)..(10): deoxy
  misc_feature (11)..(11): 2'-deoxy-2'-fluoro
  misc_feature (12)..(15): deoxy
  misc_feature (16)..(17): 2'-deoxy-2'-fluoro
  misc_feature (18)..(19): deoxy
  misc_feature (21)..(21): 3'-3 attached inverted deoxyabasic moiety.
cgcuccgagacgggauugatt

SEQ ID NO: 275 - DNA, 21 bp, Artificial Sequence
  Synthetic
  misc_feature (1)..(1): 5'-3 attached inverted deoxyabasic moiety.
  misc_feature (1)..(1): 2'-deoxy-2'-fluoro
  misc_feature (2)..(3): deoxy
  misc_feature (4)..(4): 2'-deoxy-2'-fluoro
  misc_feature (5)..(6): deoxy
  misc_feature (7)..(8): 2'-deoxy-2'-fluoro
  misc_feature (9)..(9): deoxy
  misc_feature (10)..(10): 2'-deoxy-2'-fluoro
  misc_feature (11)..(11): deoxy
  misc_feature (12)..(13): 2'-deoxy-2'-fluoro
  misc_feature (14)..(14): deoxy
  misc_feature (15)..(17): 2'-deoxy-2'-fluoro
  misc_feature (18)..(18): deoxy
  misc_feature (19)..(19): 2'-deoxy-2'-fluoro
  misc_feature (21)..(21): 3'-3 attached inverted deoxyabasic moiety.
cggugguuacaccauucgutt

SEQ ID NO: 276 - DNA, 21 bp, Artificial Sequence
  Synthetic
  misc_feature (1)..(1): 5'-3 attached inverted deoxyabasic moiety.
  misc_feature (1)..(1): 2'-deoxy-2'-fluoro
  misc_feature (2)..(2): deoxy
  misc_feature (3)..(7): 2'-deoxy-2'-fluoro
  misc_feature (8)..(9): deoxy
  misc_feature (10)..(13): 2'-deoxy-2'-fluoro
  misc_feature (14)..(16): deoxy
  misc_feature (17)..(18): 2'-deoxy-2'-fluoro
  misc_feature (19)..(19): deoxy
  misc_feature (21)..(21): 3'-3 attached inverted deoxyabasic moiety.
cguucuuaacuuugaaccatt

SEQ ID NO: 277 - DNA, 21 bp, Artificial Sequence
  Synthetic
  misc_feature (1)..(1): 5'-3 attached inverted deoxyabasic moiety.
  misc_feature (1)..(2): deoxy
  misc_feature (3)..(4): 2'-deoxy-2'-fluoro
  misc_feature (5)..(6): deoxy
  misc_feature (7)..(8): 2'-deoxy-2'-fluoro
  misc_feature (9)..(10): deoxy
  misc_feature (11)..(11): 2'-deoxy-2'-fluoro
  misc_feature (12)..(13): deoxy
  misc_feature (14)..(14): 2'-deoxy-2'-fluoro
  misc_feature (15)..(19): deoxy
  misc_feature (21)..(21): 3'-3 attached inverted deoxyabasic moiety.
gaccgacugacgguagggatt

SEQ ID NO: 278 - DNA, 21 bp, Artificial Sequence
  Synthetic
  misc_feature (1)..(1): 5'-3 attached inverted deoxyabasic moiety.
  misc_feature (1)..(3): 2'-deoxy-2'-fluoro
  misc_feature (4)..(4): deoxy
  misc_feature (5)..(8): 2'-deoxy-2'-fluoro
  misc_feature (9)..(12): deoxy
  misc_feature (13)..(13): 2'-deoxy-2'-fluoro
  misc_feature (14)..(17): deoxy
  misc_feature (18)..(19): 2'-deoxy-2'-fluoro
  misc_feature (21)..(21): 3'-3 attached inverted deoxyabasic moiety.
cccgcuccgagacgggauutt

SEQ ID NO: 279 - DNA, 21 bp, Artificial Sequence
  Synthetic
  misc_feature (1)..(1): deoxy
  misc_feature (2)..(3): 2'-deoxy-2'-fluoro
  misc_feature (4)..(5): deoxy
  misc_feature (6)..(9): 2'-deoxy-2'-fluoro
  misc_feature (10)..(10): deoxy
  misc_feature (11)..(14): 2'-deoxy-2'-fluoro
  misc_feature (15)..(18): deoxy
  misc_feature (19)..(19): 2'-deoxy-2'-fluoro
  misc_feature (20)..(21): phosphorothioate linkage
aucaaucccgucucggagctt

SEQ ID NO: 280 - DNA, 21 bp, Artificial Sequence
  Synthetic
  misc_feature (1)..(1): 2'-deoxy-2'-fluoro
  misc_feature (2)..(3): deoxy
  misc_feature (4)..(4): 2'-deoxy-2'-fluoro
  misc_feature (5)..(5): deoxy
  misc_feature (6)..(7): 2'-deoxy-2'-fluoro
  misc_feature (8)..(8): deoxy
  misc_feature (9)..(12): 2'-deoxy-2'-fluoro
  misc_feature (13)..(17): deoxy
  misc_feature (18)..(19): 2'-deoxy-2'-fluoro
  misc_feature (20)..(21): phosphorothioate linkage
ugauguuacuuuaggagcctt

SEQ ID NO: 281 - DNA, 21 bp, Artificial Sequence
  Synthetic
  misc_feature (1)..(1): 2'-deoxy-2'-fluoro
  misc_feature (2)..(2): deoxy
  misc_feature (3)..(3): 2'-deoxy-2'-fluoro
  misc_feature (4)..(8): deoxy
  misc_feature (9)..(9): 2'-deoxy-2'-fluoro
  misc_feature (10)..(13): deoxy
  misc_feature (14)..(15): 2'-deoxy-2'-fluoro
  misc_feature (16)..(17): deoxy
  misc_feature (18)..(19): 2'-deoxy-2'-fluoro
  misc_feature (20)..(21): phosphorothioate linkage
uacgaaaacagaaccaauctt

SEQ ID NO: 282 - DNA, 21 bp, Artificial Sequence
  Synthetic
  misc_feature (1)..(2): 2'-deoxy-2'-fluoro
  misc_feature (3)..(4): deoxy
  misc_feature (5)..(8): 2'-deoxy-2'-fluoro
  misc_feature (9)..(9): deoxy
  misc_feature (10)..(13): 2'-deoxy-2'-fluoro
  misc_feature (14)..(17): deoxy
  misc_feature (18)..(18): 2'-deoxy-2'-fluoro
  misc_feature (19)..(19): deoxy
  misc_feature (20)..(21): phosphorothioate linkage
ucaaucccgucucggagcgtt

SEQ ID NO: 283 - DNA, 21 bp, Artificial Sequence
  Synthetic
  misc_feature (1)..(1): deoxy
  misc_feature (2)..(2): 2'-deoxy-2'-fluoro
  misc_feature (3)..(5): deoxy
  misc_feature (6)..(6): 2'-deoxy-2'-fluoro
  misc_feature (7)..(8): deoxy
  misc_feature (9)..(9): 2'-deoxy-2'-fluoro
  misc_feature (10)..(10): deoxy
  misc_feature (11)..(11): 2'-deoxy-2'-fluoro
  misc_feature (12)..(13): deoxy
  misc_feature (14)..(15): 2'-deoxy-2'-fluoro
  misc_feature (16)..(16): deoxy
  misc_feature (17)..(18): 2'-deoxy-2'-fluoro
  misc_feature (19)..(19): deoxy
  misc_feature (20)..(21): phosphorothioate linkage
acgaaugguguaaccaccgtt

SEQ ID NO: 284 - DNA, 21 bp, Artificial Sequence
  Synthetic
  misc_feature (1)..(1): 2'-deoxy-2'-fluoro
  misc_feature (2)..(3): deoxy
  misc_feature (4)..(6): 2'-deoxy-2'-fluoro
  misc_feature (7)..(10): deoxy
  misc_feature (11)..(12): 2'-deoxy-2'-fluoro
  misc_feature (13)..(17): deoxy
  misc_feature (18)..(18): 2'-deoxy-2'-fluoro
  misc_feature (19)..(19): deoxy
  misc_feature (20)..(21): phosphorothioate linkage
ugguucaaaguuaagaacgtt

SEQ ID NO: 285 - DNA, 22 bp, Artificial Sequence
  Synthetic
  misc_feature (1)..(5): 2'-deoxy-2'-fluoro
  misc_feature (6)..(6): deoxy
  misc_feature (7)..(8): 2'-deoxy-2'-fluoro
  misc_feature (9)..(10): 2'-deoxy-2'-fluoro
  misc_feature (9)..(9): deoxy
  misc_feature (12)..(13): deoxy
  misc_feature (14)..(15): 2'-deoxy-2'-fluoro
  misc_feature (16)..(17): deoxy
  misc_feature (18)..(19): 2'-deoxy-2'-fluoro
  misc_feature (20)..(21): phosphorothioate linkage
mucccuaccgucagucgguctt

SEQ ID NO: 286 - DNA, 21 bp, Artificial Sequence
  Synthetic
  misc_feature (1)..(2): deoxy
  misc_feature (3)..(6): 2'-deoxy-2'-fluoro
  misc_feature (7)..(7): deoxy
  misc_feature (8)..(11): 2'-deoxy-2'-fluoro
  misc_feature (12)..(15): deoxy
  misc_feature (16)..(16): 2'-deoxy-2'-fluoro
  misc_feature (17)..(19): deoxy
  misc_feature (20)..(21): phosphorothioate linkage
aaucccgucucggagcgggtt

SEQ ID NO: 287 - DNA, 21 bp, Artificial Sequence
  Synthetic
  misc_feature (1)..(1): 5'-3 attached inverted deoxyabasic moiety.
  misc_feature (1)..(1): 2'-O-methyl
  misc_feature (2)..(5): 2'-deoxy-2'-fluoro
  misc_feature (6)..(9): 2'-O-methyl
  misc_feature (10)..(10): 2'-deoxy-2'-fluoro
  misc_feature (11)..(14): 2'-O-methyl
  misc_feature (15)..(16): 2'-deoxy-2'-fluoro
  misc_feature (17)..(18): 2'-O-methyl
  misc_feature (19)..(19): 2'-deoxy-2'-fluoro
  misc_feature (21)..(21): 3'-3 attached inverted deoxyabasic moiety.
gcuccgagacgggauugautt

SEQ ID NO: 288 - DNA, 21 bp, Artificial Sequence
  Synthetic
  misc_feature (1)..(1): 5'-3 attached inverted deoxyabasic moiety.
  misc_feature (1)..(2): 2'-O-methyl
  misc_feature (3)..(7): 2'-deoxy-2'-fluoro
  misc_feature (8)..(11): 2'-O-methyl
  misc_feature (12)..(12): 2'-deoxy-2'-fluoro
  misc_feature (13)..(14): 2'-O-methyl
  misc_feature (15)..(15): 2'-deoxy-2'-fluoro
  misc_feature (16)..(16): 2'-O-methyl
  misc_feature (17)..(18): 2'-deoxy-2'-fluoro
  misc_feature (19)..(19): 2'-O-methyl
  misc_feature (21)..(21): 3'-3 attached inverted deoxyabasic moiety.
ggcuccuaaaguaacaucatt

SEQ ID NO: 289 - DNA, 21 bp, Artificial Sequence
  Synthetic
  misc_feature (1)..(1): 5'-3 attached inverted deoxyabasic moiety.
  misc_feature (1)..(2): 2'-O-methyl
  misc_feature (3)..(4): 2'-deoxy-2'-fluoro
  misc_feature (5)..(6): 2'-O-methyl
  misc_feature (7)..(10): 2'-deoxy-2'-fluoro
  misc_feature (11)..(11): 2'-O-methyl
  misc_feature (12)..(16): 2'-deoxy-2'-fluoro
  misc_feature (17)..(17): 2'-O-methyl
  misc_feature (18)..(18): 2'-deoxy-2'-fluoro
  misc_feature (19)..(19): 2'-O-methyl
  misc_feature (21)..(21): 3'-3 attached inverted deoxyabasic moiety.
gauugguucuguuuucguatt

SEQ ID NO: 290 - DNA, 21 bp, Artificial Sequence
  Synthetic
  misc_feature (1)..(1): 5'-3 attached inverted deoxyabasic moiety.
  misc_feature (1)..(1): 2'-deoxy-2'-fluoro
  misc_feature (2)..(2): 2'-O-methyl
  misc_feature (3)..(6): 2'-deoxy-2'-fluoro
  misc_feature (7)..(10): 2'-O-methyl
  misc_feature (11)..(11): 2'-deoxy-2'-fluoro
  misc_feature (12)..(15): 2'-O-methyl
  misc_feature (16)..(17): 2'-deoxy-2'-fluoro
  misc_feature (18)..(19): 2'-O-methyl
  misc_feature (21)..(21): 3'-3 attached inverted deoxyabasic moiety.
cgcuccgagacgggauugatt

SEQ ID NO: 291 - DNA, 21 bp, Artificial Sequence
  Synthetic
  misc_feature (1)..(1): 5'-3 attached inverted deoxyabasic moiety.
  misc_feature (1)..(1): 2'-deoxy-2'-fluoro
  misc_feature (2)..(3): 2'-O-methyl
  misc_feature (4)..(4): 2'-deoxy-2'-fluoro
  misc_feature (5)..(6): 2'-O-methyl
  misc_feature (7)..(8): 2'-deoxy-2'-fluoro
  misc_feature (9)..(9): 2'-O-methyl
  misc_feature (10)..(10): 2'-deoxy-2'-fluoro
  misc_feature (11)..(11): 2'-O-methyl
  misc_feature (12)..(13): 2'-deoxy-2'-fluoro
  misc_feature (14)..(14): 2'-O-methyl
  misc_feature (15)..(17): 2'-deoxy-2'-fluoro
  misc_feature (18)..(18): 2'-O-methyl
  misc_feature (19)..(19): 2'-deoxy-2'-fluoro
  misc_feature (21)..(21): 3'-3 attached inverted deoxyabasic moiety.
cggugguuacaccauucgutt

SEQ ID NO: 292 - DNA, 21 bp, Artificial Sequence
  Synthetic
  misc_feature (1)..(1): 5'-3 attached inverted deoxyabasic moiety.
  misc_feature (1)..(1): 2'-deoxy-2'-fluoro
  misc_feature (2)..(2): 2'-O-methyl
  misc_feature (3)..(7): 2'-deoxy-2'-fluoro
  misc_feature (8)..(9): 2'-O-methyl
  misc_feature (10)..(13): 2'-deoxy-2'-fluoro
  misc_feature (14)..(16): 2'-O-methyl
  misc_feature (17)..(18): 2'-deoxy-2'-fluoro
  misc_feature (19)..(19): 2'-O-methyl
  misc_feature (21)..(21): 3'-3 attached inverted deoxyabasic moiety.
cguucuuaacuuugaaccatt

SEQ ID NO: 293 - DNA, 21 bp, Artificial Sequence
  Synthetic
  misc_feature (1)..(1): 5'-3 attached inverted deoxyabasic moiety.
  misc_feature (1)..(2): 2'-O-methyl
  misc_feature (3)..(4): 2'-deoxy-2'-fluoro
  misc_feature (5)..(6): 2'-O-methyl
  misc_feature (7)..(8): 2'-deoxy-2'-fluoro
  misc_feature (9)..(10): 2'-O-methyl
  misc_feature (11)..(11): 2'-deoxy-2'-fluoro
  misc_feature (12)..(13): 2'-O-methyl
  misc_feature (14)..(14): 2'-deoxy-2'-fluoro
  misc_feature (15)..(19): 2'-O-methyl
  misc_feature (21)..(21): 3'-3 attached inverted deoxyabasic moiety.
gaccgacugacgguagggatt

SEQ ID NO: 294 - DNA, 21 bp, Artificial Sequence
  Synthetic
  misc_feature (1)..(1): 5'-3 attached inverted deoxyabasic moiety.
  misc_feature (1)..(3): 2'-deoxy-2'-fluoro
  misc_feature (4)..(4): 2'-O-methyl
  misc_feature (5)..(8): 2'-deoxy-2'-fluoro
  misc_feature (9)..(12): 2'-O-methyl
  misc_feature (13)..(13): 2'-deoxy-2'-fluoro
  misc_feature (14)..(17): 2'-O-methyl
  misc_feature (18)..(19): 2'-deoxy-2'-fluoro
  misc_feature (21)..(21): 3'-3 attached inverted deoxyabasic moiety.
cccgcuccgagacgggauutt

SEQ ID NO: 295 - DNA, 21 bp, Artificial Sequence
  Synthetic
  misc_feature (1)..(1): 2'-O-methyl
  misc_feature (2)..(3): 2'-deoxy-2'-fluoro
  misc_feature (4)..(5): 2'-O-methyl
  misc_feature (6)..(9): 2'-deoxy-2'-fluoro
  misc_feature (10)..(10): 2'-O-methyl
  misc_feature (11)..(14): 2'-deoxy-2'-fluoro
  misc_feature (15)..(18): 2'-O-methyl
  misc_feature (19)..(19): 2'-deoxy-2'-fluoro
  misc_feature (20)..(21): phosphorothioate linkage
aucaaucccgucucggagctt

SEQ ID NO: 296 - DNA, 21 bp, Artificial Sequence
  Synthetic
  misc_feature (1)..(1): 2'-deoxy-2'-fluoro
  misc_feature (2)..(3): 2'-O-methyl
  misc_feature (4)..(4): 2'-deoxy-2'-fluoro
  misc_feature (5)..(5): 2'-O-methyl
  misc_feature (6)..(7): 2'-deoxy-2'-fluoro
  misc_feature (8)..(8): 2'-O-methyl
  misc_feature (9)..(12): 2'-deoxy-2'-fluoro
  misc_feature (13)..(17): 2'-O-methyl
  misc_feature (18)..(19): 2'-deoxy-2'-fluoro
  misc_feature (20)..(21): phosphorothioate linkage
ugauguuacuuuaggagcctt

SEQ ID NO: 297 - DNA, 21 bp, Artificial Sequence
  Synthetic
  misc_feature (1)..(1): 2'-deoxy-2'-fluoro
  misc_feature (2)..(2): 2'-O-methyl
  misc_feature (3)..(3): 2'-deoxy-2'-fluoro
  misc_feature (4)..(8): 2'-O-methyl
  misc_feature (9)..(9): 2'-deoxy-2'-fluoro
  misc_feature (10)..(13): 2'-O-methyl
  misc_feature (14)..(15): 2'-deoxy-2'-fluoro
  misc_feature (16)..(17): 2'-O-methyl
  misc_feature (18)..(19): 2'-deoxy-2'-fluoro
  misc_feature (20)..(21): phosphorothioate linkage
uacgaaaacagaaccaauctt

SEQ ID NO: 298 - DNA, 21 bp, Artificial Sequence
  Synthetic
  misc_feature (1)..(2): 2'-deoxy-2'-fluoro
  misc_feature (3)..(4): 2'-O-methyl
  misc_feature (5)..(8): 2'-deoxy-2'-fluoro
  misc_feature (9)..(9): 2'-O-methyl
  misc_feature (10)..(13): 2'-deoxy-2'-fluoro
  misc_feature (14)..(17): 2'-O-methyl
  misc_feature (18)..(18): 2'-deoxy-2'-fluoro
  misc_feature (19)..(19): 2'-O-methyl
  misc_feature (20)..(21): phosphorothioate linkage
ucaaucccgucucggagcgtt

SEQ ID NO: 299 - DNA, 21 bp, Artificial Sequence
  Synthetic
  misc_feature (1)..(1): 2'-O-methyl
  misc_feature (2)..(2): 2'-deoxy-2'-fluoro
  misc_feature (3)..(5): 2'-O-methyl
  misc_feature (6)..(6): 2'-deoxy-2'-fluoro
  misc_feature (7)..(8): 2'-O-methyl
  misc_feature (9)..(9): 2'-deoxy-2'-fluoro
  misc_feature (10)..(10): 2'-O-methyl
  misc_feature (11)..(11): 2'-deoxy-2'-fluoro
  misc_feature (12)..(13): 2'-O-methyl
  misc_feature (14)..(15): 2'-deoxy-2'-fluoro
  misc_feature (16)..(16): 2'-O-methyl
  misc_feature (17)..(18): 2'-deoxy-2'-fluoro
  misc_feature (19)..(19): 2'-O-methyl
  misc_feature (20)..(21): phosphorothioate linkage
acgaaugguguaaccaccgtt

SEQ ID NO: 300 - DNA, 21 bp, Artificial Sequence
  Synthetic
  misc_feature (1)..(1): 2'-deoxy-2'-fluoro
  misc_feature (2)..(3): 2'-O-methyl
  misc_feature (4)..(6): 2'-deoxy-2'-fluoro
  misc_feature (7)..(10): 2'-O-methyl
  misc_feature (11)..(12): 2'-deoxy-2'-fluoro
  misc_feature (13)..(17): 2'-O-methyl
  misc_feature (18)..(18): 2'-deoxy-2'-fluoro
  misc_feature (19)..(19): 2'-O-methyl
  misc_feature (20)..(21): phosphorothioate linkage
ugguucaaaguuaagaacgtt

SEQ ID NO: 301 - DNA, 21 bp, Artificial Sequence
  Synthetic
  misc_feature (1)..(5): 2'-deoxy-2'-fluoro
  misc_feature (6)..(6): 2'-deoxy-2'-fluoro
  misc_feature (7)..(8): 2'-deoxy-2'-fluoro
  misc_feature (9)..(9): 2'-deoxy-2'-fluoro
  misc_feature (10)..(11): 2'-deoxy-2'-fluoro
  misc_feature (12)..(13): 2'-deoxy-2'-fluoro
  misc_feature (14)..(15): 2'-deoxy-2'-fluoro
  misc_feature (16)..(17): 2'-deoxy-2'-fluoro
  misc_feature (18)..(19): 2'-deoxy-2'-fluoro
  misc_feature (20)..(21): phosphorothioate linkage
ucccuaccgucagucgguctt

SEQ ID NO: 302 - DNA, 21 bp, Artificial Sequence
  Synthetic
  misc_feature (1)..(2): 2'-O-methyl
  misc_feature (3)..(6): 2'-deoxy-2'-fluoro
  misc_feature (7)..(7): 2'-O-methyl
  misc_feature (8)..(11): 2'-deoxy-2'-fluoro
  misc_feature (12)..(15): 2'-O-methyl
  misc_feature (16)..(16): 2'-deoxy-2'-fluoro
  misc_feature (17)..(19): 2'-O-methyl
  misc_feature (20)..(21): phosphorothioate linkage
aaucccgucucggagcgggtt

SEQ ID NO: 303 - DNA, 21 bp, Artificial Sequence
  Synthetic
  misc_feature (1)..(1): 5'-3 attached inverted deoxyabasic moiety.
  misc_feature (21)..(21): 3'-3 attached inverted deoxyabasic moiety.
gcuccgagacgggauugautt

SEQ ID NO: 304 - DNA, 21 bp, Artificial Sequence
  Synthetic
  misc_feature (1)..(1): 5'-3 attached inverted deoxyabasic moiety.
  misc_feature (21)..(21): 3'-3 attached inverted deoxyabasic moiety.
ggcuccuaaaguaacaucatt

SEQ ID NO: 305 - DNA, 21 bp, Artificial Sequence
  Synthetic
  misc_feature (1)..(1): 5'-3 attached inverted deoxyabasic moiety.
  misc_feature (21)..(21): 3'-3 attached inverted deoxyabasic moiety.
gauugguucuguuuucguatt

SEQ ID NO: 306 - DNA, 21 bp, Artificial Sequence
  Synthetic
  misc_feature (1)..(1): 5'-3 attached inverted deoxyabasic moiety.
  misc_feature (21)..(21): 3'-3 attached inverted deoxyabasic moiety.
cgcuccgagacgggauugatt

SEQ ID NO: 307 - DNA, 21 bp, Artificial Sequence
  Synthetic
  misc_feature (1)..(1): 5'-3 attached inverted deoxyabasic moiety.
  misc_feature (21)..(21): 3'-3 attached inverted deoxyabasic moiety.
cggugguuacaccauucgutt

SEQ ID NO: 308 - DNA, 21 bp, Artificial Sequence
  Synthetic
  misc_feature (1)..(1): 5'-3 attached inverted deoxyabasic moiety.
  misc_feature (21)..(21): 3'-3 attached inverted deoxyabasic moiety.
cguucuuaacuuugaaccatt

SEQ ID NO: 309 - DNA, 21 bp, Artificial Sequence
  Synthetic
  misc_feature (1)..(1): 5'-3 attached inverted deoxyabasic moiety.
  misc_feature (21)..(21): 3'-3 attached inverted deoxyabasic moiety.
gaccgacugacgguagggatt

SEQ ID NO: 310 - DNA, 21 bp, Artificial Sequence
  Synthetic
  misc_feature (1)..(1): 5'-3 attached inverted deoxyabasic moiety.
  misc_feature (21)..(21): 3'-3 attached inverted deoxyabasic moiety.
cccgcuccgagacgggauutt

SEQ ID NO: 311 - DNA, 21 bp, Artificial Sequence
  Synthetic
  misc_feature (20)..(21): phosphorothioate linkage
aucaaucccgucucggagctt

SEQ ID NO: 312 - DNA, 21 bp, Artificial Sequence
  Synthetic
  misc_feature (20)..(21): phosphorothioate linkage
ugauguuacuuuaggagcctt

SEQ ID NO: 313 - DNA, 21 bp, Artificial Sequence
  Synthetic
  misc_feature (20)..(21): phosphorothioate linkage
uacgaaaacagaaccaauctt

SEQ ID NO: 314 - DNA, 21 bp, Artificial Sequence
  Synthetic
  misc_feature (20)..(21): phosphorothioate linkage
ucaaucccgucucggagcgtt

SEQ ID NO: 315 - DNA, 21 bp, Artificial Sequence
  Synthetic
  misc_feature (20)..(21): phosphorothioate linkage
acgaaugguguaaccaccgtt

SEQ ID NO: 316 - DNA, 21 bp, Artificial Sequence
  Synthetic
  misc_feature (20)..(21): phosphorothioate linkage
ugguucaaaguuaagaacgtt

SEQ ID NO: 317 - DNA, 21 bp, Artificial Sequence
  Synthetic
  misc_feature (20)..(21): phosphorothioate linkage
ucccuaccgucagucgguctt

SEQ ID NO: 318 - DNA, 21 bp, Artificial Sequence
  Synthetic
  misc_feature (20)..(21): phosphorothioate linkage
aaucccgucucggagcgggtt

SEQ ID NO: 319 - DNA, 21 bp, Artificial Sequence
  Synthetic
  misc_feature (1)..(1): 2'-O-methyl
  misc_feature (2)..(3): 2'-deoxy-2'-fluoro
  misc_feature (4)..(5): 2'-O-methyl
  misc_feature (6)..(9): 2'-deoxy-2'-fluoro
  misc_feature (10)..(10): 2'-O-methyl
  misc_feature (11)..(14): 2'-deoxy-2'-fluoro
  misc_feature (15)..(18): 2'-O-methyl
  misc_feature (19)..(19): 2'-deoxy-2'-fluoro
  misc_feature (21)..(21): 3'-3 attached inverted deoxyabasic moiety.
aucaaucccgucucggagctt

SEQ ID NO: 320 - DNA, 21 bp, Artificial Sequence
  Synthetic
  misc_feature (1)..(1): 2'-deoxy-2'-fluoro
  misc_feature (2)..(3): 2'-O-methyl
  misc_feature (4)..(4): 2'-deoxy-2'-fluoro
  misc_feature (5)..(5): 2'-O-methyl
  misc_feature (6)..(7): 2'-deoxy-2'-fluoro
  misc_feature (8)..(8): 2'-O-methyl
  misc_feature (9)..(12): 2'-deoxy-2'-fluoro
  misc_feature (13)..(17): 2'-O-methyl
  misc_feature (18)..(19): 2'-deoxy-2'-fluoro
  misc_feature (21)..(21): 3'-3 attached inverted deoxyabasic moiety.
ugauguuacuuuaggagcctt

SEQ ID NO: 321 - DNA, 21 bp, Artificial Sequence
  Synthetic
  misc_feature (1)..(1): 2'-deoxy-2'-fluoro
  misc_feature (2)..(2): 2'-O-methyl
  misc_feature (3)..(3): 2'-deoxy-2'-fluoro
  misc_feature (4)..(8): 2'-O-methyl
  misc_feature (9)..(9): 2'-deoxy-2'-fluoro
  misc_feature (10)..(13): 2'-O-methyl
  misc_feature (14)..(15): 2'-deoxy-2'-fluoro
  misc_feature (16)..(17): 2'-O-methyl
  misc_feature (18)..(19): 2'-deoxy-2'-fluoro
  misc_feature (21)..(21): 3'-3 attached inverted deoxyabasic moiety.
uacgaaaacagaaccaauctt

SEQ ID NO: 322 - DNA, 21 bp, Artificial Sequence
  Synthetic
  misc_feature (1)..(2): 2'-deoxy-2'-fluoro
  misc_feature (3)..(4): 2'-O-methyl
  misc_feature (5)..(8): 2'-deoxy-2'-fluoro
  misc_feature (9)..(9): 2'-O-methyl
  misc_feature (10)..(13): 2'-deoxy-2'-fluoro
  misc_feature (14)..(17): 2'-O-methyl
  misc_feature (18)..(18): 2'-deoxy-2'-fluoro
  misc_feature (19)..(19): 2'-O-methyl
  misc_feature (21)..(21): 3'-3 attached inverted deoxyabasic moiety.
ucaaucccgucucggagcgtt

SEQ ID NO: 323 - DNA, 21 bp, Artificial Sequence
  Synthetic
  misc_feature (1)..(1): 2'-O-methyl
  misc_feature (2)..(2): 2'-deoxy-2'-fluoro
  misc_feature (3)..(5): 2'-O-methyl
  misc_feature (6)..(6): 2'-deoxy-2'-fluoro
  misc_feature (7)..(8): 2'-O-methyl
  misc_feature (9)..(9): 2'-deoxy-2'-fluoro
  misc_feature (10)..(10): 2'-O-methyl
  misc_feature (11)..(11): 2'-deoxy-2'-fluoro
  misc_feature (12)..(13): 2'-O-methyl
  misc_feature (14)..(15): 2'-deoxy-2'-fluoro
  misc_feature (16)..(16): 2'-O-methyl
  misc_feature (17)..(18): 2'-deoxy-2'-fluoro
  misc_feature (19)..(19): 2'-O-methyl
  misc_feature (21)..(21): 3'-3 attached inverted deoxyabasic moiety.
acgaaugguguaaccaccgtt

SEQ ID NO: 324 - DNA, 21 bp, Artificial Sequence
  Synthetic
  misc_feature (1)..(1): 2'-deoxy-2'-fluoro
  misc_feature (2)..(3): 2'-O-methyl
  misc_feature (4)..(6): 2'-deoxy-2'-fluoro
  misc_feature (7)..(10): 2'-O-methyl
  misc_feature (11)..(12): 2'-deoxy-2'-fluoro
  misc_feature (13)..(17): 2'-O-methyl
  misc_feature (18)..(18): 2'-deoxy-2'-fluoro
  misc_feature (19)..(19): 2'-O-methyl
  misc_feature (21)..(21): 3'-3 attached inverted deoxyabasic moiety.
ugguucaaaguuaagaacgtt

SEQ ID NO: 325 - DNA, 21 bp, Artificial Sequence
  Synthetic
  misc_feature (1)..(5): 2'-deoxy-2'-fluoro
  misc_feature (6)..(6): 2'-O-methyl
  misc_feature (7)..(8): 2'-deoxy-2'-fluoro
  misc_feature (9)..(9): 2'-O-methyl
  misc_feature (10)..(11): 2'-deoxy-2'-fluoro
  misc_feature (11)..(12): 2'-O-methyl
  misc_feature (14)..(15): 2'-deoxy-2'-fluoro
  misc_feature (16)..(17): 2'-O-methyl
  misc_feature (18)..(19): 2'-deoxy-2'-fluoro
  misc_feature (21)..(21): 3'-3 attached inverted deoxyabasic moiety.
ucccuaccgucagucgguctt

SEQ ID NO: 326 - DNA, 21 bp, Artificial Sequence
  Synthetic
  misc_feature (1)..(2): 2'-O-methyl
  misc_feature (3)..(6): 2'-deoxy-2'-fluoro
  misc_feature (7)..(7): 2'-O-methyl
  misc_feature (8)..(11): 2'-deoxy-2'-fluoro
  misc_feature (12)..(15): 2'-O-methyl
  misc_feature (16)..(16): 2'-deoxy-2'-fluoro
  misc_feature (17)..(19): 2'-O-methyl
  misc_feature (21)..(21): 3'-3 attached inverted deoxyabasic moiety.
aaucccgucucggagcgggtt

SEQ ID NO: 327 - DNA, 21 bp, Artificial Sequence
  Synthetic
  misc_feature (21)..(21): 3'-3 attached inverted deoxyabasic moiety.
aucaaucccgucucggagctt

SEQ ID NO: 328 - DNA, 21 bp, Artificial Sequence
  Synthetic
  misc_feature (21)..(21): 3'-3 attached inverted deoxyabasic moiety.
ugauguuacuuuaggagcctt

SEQ ID NO: 329 - DNA, 21 bp, Artificial Sequence
  Synthetic
  misc_feature (21)..(21): 3'-3 attached inverted deoxyabasic moiety.
uacgaaaacagaaccaauctt

SEQ ID NO: 330 - DNA, 21 bp, Artificial Sequence
  Synthetic
  misc_feature (21)..(21): 3'-3 attached inverted deoxyabasic moiety.
ucaaucccgucucggagcgtt

SEQ ID NO: 331 - DNA, 21 bp, Artificial Sequence
  Synthetic
  misc_feature (21)..(21): 3'-3 attached inverted deoxyabasic moiety.
acgaaugguguaaccaccgtt

SEQ ID NO: 332 - DNA, 21 bp, Artificial Sequence
  Synthetic
  misc_feature (21)..(21): 3'-3 attached inverted deoxyabasic moiety.
ugguucaaaguuaagaacgtt

SEQ ID NO: 333 - DNA, 21 bp, Artificial Sequence
  Synthetic
  misc_feature (21)..(21): 3'-3 attached inverted deoxyabasic moiety.
ucccuaccgucagucgguctt

SEQ ID NO: 334 - DNA, 21 bp, Artificial Sequence
  Synthetic
  misc_feature (21)..(21): 3'-3 attached inverted deoxyabasic moiety.
aaucccgucucggagcgggtt

SEQ ID NO: 335 - DNA, 21 bp, Artificial Sequence
  Synthetic
  misc_feature (4)..(5): 2'-O-methyl
  misc_feature (6)..(9): 2'-deoxy-2'-fluoro
  misc_feature (10)..(10): 2'-O-methyl
  misc_feature (11)..(14): 2'-deoxy-2'-fluoro
  misc_feature (15)..(18): 2'-O-methyl
  misc_feature (19)..(19): 2'-deoxy-2'-fluoro
  misc_feature (20)..(21): phosphorothioate linkage
aucaaucccgucucggagctt

SEQ ID NO: 336 - DNA, 21 bp, Artificial Sequence
  Synthetic
  misc_feature (4)..(4): 2'-deoxy-2'-fluoro
  misc_feature (5)..(5): 2'-O-methyl
  misc_feature (6)..(7): 2'-deoxy-2'-fluoro
  misc_feature (8)..(8): 2'-O-methyl
  misc_feature (9)..(12): 2'-deoxy-2'-fluoro
  misc_feature (13)..(17): 2'-O-methyl
  misc_feature (18)..(19): 2'-deoxy-2'-fluoro
  misc_feature (20)..(21): phosphorothioate linkage
ugauguuacuuuaggagcctt

SEQ ID NO: 337 - DNA, 21 bp, Artificial Sequence
  Synthetic
  misc_feature (4)..(8): 2'-O-methyl
  misc_feature (9)..(9): 2'-deoxy-2'-fluoro
  misc_feature (10)..(13): 2'-O-methyl
  misc_feature (14)..(15): 2'-deoxy-2'-fluoro
  misc_feature (16)..(17): 2'-O-methyl
  misc_feature (18)..(19): 2'-deoxy-2'-fluoro
  misc_feature (20)..(21): phosphorothioate linkage
uacgaaaacagaaccaauctt

SEQ ID NO: 338 - DNA, 21 bp, Artificial Sequence
  Synthetic
  misc_feature (4)..(4): 2'-O-methyl
  misc_feature (5)..(8): 2'-deoxy-2'-fluoro
  misc_feature (9)..(9): 2'-O-methyl
  misc_feature (10)..(13): 2'-deoxy-2'-fluoro
  misc_feature (14)..(17): 2'-O-methyl
  misc_feature (18)..(18): 2'-deoxy-2'-fluoro
  misc_feature (19)..(19): 2'-O-methyl
  misc_feature (20)..(21): phosphorothioate linkage
ucaaucccgucucggagcgtt

SEQ ID NO: 339 - DNA, 21 bp, Artificial Sequence
  Synthetic
  misc_feature (4)..(5): 2'-O-methyl
  misc_feature (6)..(6): 2'-deoxy-2'-fluoro
  misc_feature (7)..(8): 2'-O-methyl
  misc_feature (9)..(9): 2'-deoxy-2'-fluoro
  misc_feature (10)..(10): 2'-O-methyl
  misc_feature (11)..(11): 2'-deoxy-2'-fluoro
  misc_feature (12)..(13): 2'-O-methyl
  misc_feature (14)..(15): 2'-deoxy-2'-fluoro
  misc_feature (16)..(16): 2'-O-methyl
  misc_feature (17)..(18): 2'-deoxy-2'-fluoro
  misc_feature (19)..(19): 2'-O-methyl
  misc_feature (20)..(21): phosphorothioate linkage
acgaaugguguaaccaccgtt

SEQ ID NO: 340 - DNA, 21 bp, Artificial Sequence
  Synthetic
  misc_feature (4)..(6): 2'-deoxy-2'-fluoro
  misc_feature (7)..(10): 2'-O-methyl
  misc_feature (11)..(12): 2'-deoxy-2'-fluoro
  misc_feature (13)..(17): 2'-O-methyl
  misc_feature (18)..(18): 2'-deoxy-2'-fluoro
  misc_feature (19)..(19): 2'-O-methyl
  misc_feature (20)..(21): phosphorothioate linkage
ugguucaaaguuaagaacgtt

SEQ ID NO: 341 - DNA, 21 bp, Artificial Sequence
  Synthetic
  misc_feature (4)..(5): 2'-deoxy-2'-fluoro
  misc_feature (6)..(6): 2'-O-methyl
  misc_feature (7)..(8): 2'-deoxy-2'-fluoro
  misc_feature (9)..(9): 2'-O-methyl
  misc_feature (10)..(11): 2'-deoxy-2'-fluoro
  misc_feature (12)..(13): 2'-O-methyl
  misc_feature (14)..(15): 2'-deoxy-2'-fluoro
  misc_feature (16)..(17): 2'-O-methyl
  misc_feature (18)..(19): 2'-deoxy-2'-fluoro
  misc_feature (20)..(21): phosphorothioate linkage
ucccuaccgucagucgguctt

SEQ ID NO: 342 - DNA, 21 bp, Artificial Sequence
  Synthetic
  misc_feature (4)..(6): 2'-deoxy-2'-fluoro
  misc_feature (7)..(7): 2'-O-methyl
  misc_feature (8)..(11): 2'-deoxy-2'-fluoro
  misc_feature (12)..(15): 2'-O-methyl
  misc_feature (16)..(16): 2'-deoxy-2'-fluoro
  misc_feature (17)..(19): 2'-O-methyl
  misc_feature (20)..(21): phosphorothioate linkage
aaucccgucucggagcgggtt

SEQ ID NO: 343 - RNA, 19 nt, Artificial Sequence
  Synthetic
ccgagcuuucggcaccucu

SEQ ID NO: 344 - RNA, 19 nt, Artificial Sequence
  Synthetic
ugccgggugguaccgagcc

SEQ ID NO: 345 - RNA, 19 nt, Artificial Sequence
  Synthetic
cuucccggcgcccccuccu

SEQ ID NO: 346 - RNA, 19 nt, Artificial Sequence
  Synthetic
ucuccucccaccggccugc

SEQ ID NO: 347 - RNA, 19 nt, Artificial Sequence
  Synthetic
cccuuccccgcgggacuau

SEQ ID NO: 348 - RNA, 19 nt, Artificial Sequence
  Synthetic
ucgcccccacguuucccuc

SEQ ID NO: 349 - RNA, 19 nt, Artificial Sequence
  Synthetic
cagcccuuuucucucccgg

SEQ ID NO: 350 - RNA, 19 nt, Artificial Sequence
  Synthetic
gccgagccgcggcggcagc

SEQ ID NO: 351 - RNA, 19 nt, Artificial Sequence
  Synthetic
cagcagcagcagcagcagc

SEQ ID NO: 352 - RNA, 19 nt, Artificial Sequence
  Synthetic
caggaggaggagcccggug

SEQ ID NO: 353 - RNA, 19 nt, Artificial Sequence
  Synthetic
ggcggcgguggccggggag

SEQ ID NO: 354 - RNA, 19 nt, Artificial Sequence
  Synthetic
gcccauggcguacagucaa

SEQ ID NO: 355 - RNA, 19 nt, Artificial Sequence
  Synthetic
aggaggcggcaaaaaaaaa

SEQ ID NO: 356 - RNA, 19 nt, Artificial Sequence
  Synthetic
agucugcuacuacuacgac

SEQ ID NO: 357 - RNA, 19 nt, Artificial Sequence
  Synthetic
cggugauauuggaaauuau

SEQ ID NO: 358 - RNA, 19 nt, Artificial Sequence
  Synthetic
uuauuauggacagggucau

SEQ ID NO: 359 - RNA, 19 nt, Artificial Sequence
  Synthetic
ucccaugaagccucauaga

SEQ ID NO: 360 - RNA, 19 nt, Artificial Sequence
  Synthetic
aauccgcaugacccauaac

SEQ ID NO: 361 - RNA, 19 nt, Artificial Sequence
  Synthetic
cuugcuguuaaauuauggc

SEQ ID NO: 362 - RNA, 19 nt, Artificial Sequence
  Synthetic
cuuauacagaaaaauggaa

SEQ ID NO: 363 - RNA, 19 nt, Artificial Sequence
  Synthetic
aauauauaggccccauaaa

SEQ ID NO: 364 - RNA, 19 nt, Artificial Sequence
  Synthetic
agccacugccgaagaaaug

SEQ ID NO: 365 - RNA, 19 nt, Artificial Sequence
  Synthetic
gacaaaauaucacagugau

SEQ ID NO: 366 - RNA, 19 nt, Artificial Sequence
  Synthetic
ugaguauaucaaauuucua

SEQ ID NO: 367 - RNA, 19 nt, Artificial Sequence
  Synthetic
acggucaauaagaccagau

SEQ ID NO: 368 - RNA, 19 nt, Artificial Sequence
  Synthetic
uaacaugucugaguauagu

SEQ ID NO: 369 - RNA, 19 nt, Artificial Sequence
  Synthetic
uaagcagaugcauauauuu

SEQ ID NO: 370 - RNA, 19 nt, Artificial Sequence
  Synthetic
uaauguuggagaagauugu

SEQ ID NO: 371 - RNA, 19 nt, Artificial Sequence
  Synthetic
uccagcguuugauggacuc

SEQ ID NO: 372 - RNA, 19 nt, Artificial Sequence
  Synthetic
cuuugaguuuugucagcuc

SEQ ID NO: 373 - RNA, 19 nt, Artificial Sequence
  Synthetic
cucaacuggcgguucaguu

SEQ ID NO: 374 - RNA, 19 nt, Artificial Sequence
  Synthetic
ugcuggagcugugaaguua

SEQ ID NO: 375 - RNA, 19 nt, Artificial Sequence
  Synthetic
aaaccgacaacagacugau

SEQ ID NO: 376 - RNA, 19 nt, Artificial Sequence
  Synthetic
uauggcuguuaauugggcu

SEQ ID NO: 377 - RNA, 19 nt, Artificial Sequence
  Synthetic
uggaggauuacaucaugcu

SEQ ID NO: 378 - RNA, 19 nt, Artificial Sequence
  Synthetic
uaagaaauacgaagcauca

SEQ ID NO: 379 - RNA, 19 nt, Artificial Sequence
  Synthetic
aggauucuguuacguuaau

SEQ ID NO: 380 - RNA, 19 nt, Artificial Sequence
  Synthetic
ugauauugugcuugccauc

SEQ ID NO: 381 - RNA, 19 nt, Artificial Sequence
  Synthetic
ccuugaauuacuaaaguau

SEQ ID NO: 382 - RNA, 19 nt, Artificial Sequence
  Synthetic
ucaucagagagucuuauau

SEQ ID NO: 383 - RNA, 19 nt, Artificial Sequence
  Synthetic
uauugauauagauauucau

SEQ ID NO: 384 - RNA, 19 nt, Artificial Sequence
  Synthetic
ucauggugaugguguugaa

SEQ ID NO: 385 - RNA, 19 nt, Artificial Sequence
  Synthetic
agaagcuuuuuauacaaca

SEQ ID NO: 386 - RNA, 19 nt, Artificial Sequence
  Synthetic
agaucguguaaugacggua

SEQ ID NO: 387 - RNA, 19 nt, Artificial Sequence
  Synthetic
aucauuccauaaauauggg

SEQ ID NO: 388 - RNA, 19 nt, Artificial Sequence
  Synthetic
ggaauacuuuccuggcaca

SEQ ID NO: 389 - RNA, 19 nt, Artificial Sequence
  Synthetic
aggagacuugagggauauu

SEQ ID NO: 390 - RNA, 19 nt, Artificial Sequence
  Synthetic
uggugcuggaaaaggcaaa

SEQ ID NO: 391 - RNA, 19 nt, Artificial Sequence
  Synthetic
auacuaugcugucaauuuu

SEQ ID NO: 392 - RNA, 19 nt, Artificial Sequence
  Synthetic
uccaaugugugaugguaua

SEQ ID NO: 393 - RNA, 19 nt, Artificial Sequence
  Synthetic
agaugaugagucauauggg

SEQ ID NO: 394 - RNA, 19 nt, Artificial Sequence
  Synthetic
gcagauauuuaagccuauu

SEQ ID NO: 395 - RNA, 19 nt, Artificial Sequence
  Synthetic
uaucucaaaggugauggag

SEQ ID NO: 396 - RNA, 19 nt, Artificial Sequence
  Synthetic
gauguaucaaccuagugcu

SEQ ID NO: 397 - RNA, 19 nt, Artificial Sequence
  Synthetic
ugugguauuacaguguggu

SEQ ID NO: 398 - RNA, 19 nt, Artificial Sequence
  Synthetic
ugcagacucauuaucuggu

SEQ ID NO: 399 - RNA, 19 nt, Artificial Sequence
  Synthetic
ugauagacuggguuguuuc

SEQ ID NO: 400 - RNA, 19 nt, Artificial Sequence
  Synthetic
caaucuaacagucaaaggu

SEQ ID NO: 401 - RNA, 19 nt, Artificial Sequence
  Synthetic
ucaugcuaaauguguagaa

SEQ ID NO: 402 - RNA, 19 nt, Artificial Sequence
  Synthetic
aguuguaaaaacuuuuaac

SEQ ID NO: 403 - RNA, 19 nt, Artificial Sequence
  Synthetic
cuuaccauuacugaugcuu

SEQ ID NO: 404 - RNA, 19 nt, Artificial Sequence
  Synthetic
uggaggagguggcuacaca

SEQ ID NO: 405 - RNA, 19 nt, Artificial Sequence
  Synthetic
aauccguaauguugcucga

SEQ ID NO: 406 - RNA, 19 nt, Artificial Sequence
  Synthetic
auguuggacauaugagacu

SEQ ID NO: 407 - RNA, 19 nt, Artificial Sequence
  Synthetic
ugcaguugcccuugauugu

SEQ ID NO: 408 - RNA, 19 nt, Artificial Sequence
  Synthetic
ugagauucccaaugaguug

SEQ ID NO: 409 - RNA, 19 nt, Artificial Sequence
  Synthetic
gccauauaaugauuacuuu

SEQ ID NO: 410 - RNA, 19 nt, Artificial Sequence
  Synthetic
ugaguauuuuggaccagac

SEQ ID NO: 411 - RNA, 19 nt, Artificial Sequence
  Synthetic
cuucaaacugcauauuagu

SEQ ID NO: 412 - RNA, 19 nt, Artificial Sequence
  Synthetic
uccuucaaacaugacaaac

SEQ ID NO: 413 - RNA, 19 nt, Artificial Sequence
  Synthetic
ccagaacacuccagaauau

SEQ ID NO: 414 - RNA, 19 nt, Artificial Sequence
  Synthetic
uauggaaaagauaaaacag

SEQ ID NO: 415 - RNA, 19 nt, Artificial Sequence
  Synthetic
gcguuuguuugaaaauuug

SEQ ID NO: 416 - RNA, 19 nt, Artificial Sequence
  Synthetic
gcgcauguuaccucaugca

SEQ ID NO: 417 - RNA, 19 nt, Artificial Sequence
  Synthetic
accugguguccagaugcaa

SEQ ID NO: 418 - RNA, 19 nt, Artificial Sequence
  Synthetic
agcuauuccagaagaugcu

SEQ ID NO: 419 - RNA, 19 nt, Artificial Sequence
  Synthetic
uguucaugaagacagugga

SEQ ID NO: 420 - RNA, 19 nt, Artificial Sequence
  Synthetic
agaugaagauggagaagau

SEQ ID NO: 421 - RNA, 19 nt, Artificial Sequence
  Synthetic
uccagacaagagaauuucu

SEQ ID NO: 422 - RNA, 19 nt, Artificial Sequence
  Synthetic
uauucgagcaucagacaag

SEQ ID NO: 423 - RNA, 19 nt, Artificial Sequence
  Synthetic
gcggauagcuugugaugaa

SEQ ID NO: 424 - RNA, 19 nt, Artificial Sequence
  Synthetic
agaauucucagauucugag

SEQ ID NO: 425 - RNA, 19 nt, Artificial Sequence
  Synthetic
ggaugaaggagaaggaggu

SEQ ID NO: 426 - RNA, 19 nt, Artificial Sequence
  Synthetic
ucgaagaaauguggcugau

SEQ ID NO: 427 - RNA, 19 nt, Artificial Sequence
  Synthetic
ucauaagaaaggagcaaag

SEQ ID NO: 428 - RNA, 19 nt, Artificial Sequence
  Synthetic
gaaagcuagaauugaagaa

SEQ ID NO: 429 - RNA, 19 nt, Artificial Sequence
  Synthetic
agauaagaaagaaacagag

SEQ ID NO: 430 - RNA, 19 nt, Artificial Sequence
  Synthetic
ggacaaaaaaacagacguu

SEQ ID NO: 431 - RNA, 19 nt, Artificial Sequence
  Synthetic
uaaggaagaagauaaaucc

SEQ ID NO: 432 - RNA, 19 nt, Artificial Sequence
  Synthetic
caaggacaacaguggugaa

SEQ ID NO: 433 - RNA, 19 nt, Artificial Sequence
  Synthetic
aaaaacagauaccaaagga

SEQ ID NO: 434 - RNA, 19 nt, Artificial Sequence
  Synthetic
aaccaaaucagaacagcuc

SEQ ID NO: 435 - RNA, 19 nt, Artificial Sequence
  Synthetic
cagcaaccccugaauuuga

SEQ ID NO: 436 - RNA, 19 nt, Artificial Sequence
  Synthetic
acagucucaccaauuucag

SEQ ID NO: 437 - RNA, 19 nt, Artificial Sequence
  Synthetic
gaaaaucauuaaaaagaaa

SEQ ID NO: 438 - RNA, 19 nt, Artificial Sequence
  Synthetic
aauauugaaaggaaaaugu

SEQ ID NO: 439 - RNA, 19 nt, Artificial Sequence
  Synthetic
uuuucuuuuugaagacuuc

SEQ ID NO: 440 - RNA, 19 nt, Artificial Sequence
  Synthetic
cuggcuucauuuuauacua

SEQ ID NO: 441 - RNA, 19 nt, Artificial Sequence
  Synthetic
acuuuggcauggacuguau

SEQ ID NO: 442 - RNA, 19 nt, Artificial Sequence
  Synthetic
uuuauuuucaaaugggacu

SEQ ID NO: 443 - RNA, 19 nt, Artificial Sequence
  Synthetic
uuuuucguuuuuguuuuuc

SEQ ID NO: 444 - RNA, 19 nt, Artificial Sequence
  Synthetic
cugggcaaguuuuauugug

SEQ ID NO: 445 - RNA, 19 nt, Artificial Sequence
  Synthetic
gagauuuucuaauuaugaa

SEQ ID NO: 446 - RNA, 19 nt, Artificial Sequence
  Synthetic
agcaaaauuucuuuucucc

SEQ ID NO: 447 - RNA, 19 nt, Artificial Sequence
  Synthetic
caccaugcuuuaugugaua

SEQ ID NO: 448 - RNA, 19 nt, Artificial Sequence
  Synthetic
aguauuuaaaauugaugug

SEQ ID NO: 449 - RNA, 19 nt, Artificial Sequence
  Synthetic
gaguuauuaugucaaaaaa

SEQ ID NO: 450 - RNA, 19 nt, Artificial Sequence
  Synthetic
aacugaucuauuaaagaag

SEQ ID NO: 451 - RNA, 19 nt, Artificial Sequence
  Synthetic
guaauuggccuuucugagc

SEQ ID NO: 452 - RNA, 19 nt, Artificial Sequence
  Synthetic
cugaaaaaaaaaaaaaaaa

SEQ ID NO: 453 - RNA, 19 nt, Artificial Sequence
  Synthetic
agaggugccgaaagcucgg

SEQ ID NO: 454 - RNA, 19 nt, Artificial Sequence
  Synthetic
ggcucgguaccacccggca

SEQ ID NO: 455 - RNA, 19 nt, Artificial Sequence
  Synthetic
aggagggggcgccgggaag

SEQ ID NO: 456 - RNA, 19 nt, Artificial Sequence
  Synthetic
gcaggccggugggaggaga

SEQ ID NO: 457 - RNA, 19 nt, Artificial Sequence
  Synthetic
auagucccgcggggaaggg

SEQ ID NO: 458 - RNA, 19 nt, Artificial Sequence
  Synthetic
gagggaaacgugggggcga

SEQ ID NO: 459 - RNA, 19 nt, Artificial Sequence
  Synthetic
ccgggagagaaaagggcug

SEQ ID NO: 460 - RNA, 19 nt, Artificial Sequence
  Synthetic
gcugccgccgcggcucggc

SEQ ID NO: 461 - RNA, 19 nt, Artificial Sequence
  Synthetic
gcugcugcugcugcugcug

SEQ ID NO: 462 - RNA, 19 nt, Artificial Sequence
  Synthetic
caccgggcuccuccuccug

SEQ ID NO: 463 - RNA, 19 nt, Artificial Sequence
  Synthetic
cuccccggccaccgccgcc

SEQ ID NO: 464 - RNA, 19 nt, Artificial Sequence
  Synthetic
uugacuguacgccaugggc

SEQ ID NO: 465 - RNA, 19 nt, Artificial Sequence
  Synthetic
uuuuuuuuugccgccuccu

SEQ ID NO: 466 - RNA, 19 nt, Artificial Sequence
  Synthetic
gucguaguaguagcagacu

SEQ ID NO: 467 - RNA, 19 nt, Artificial Sequence
  Synthetic
auaauuuccaauaucaccg

SEQ ID NO: 468 - RNA, 19 nt, Artificial Sequence
  Synthetic
augacccuguccauaauaa

SEQ ID NO: 469 - RNA, 19 nt, Artificial Sequence
  Synthetic
ucuaugaggcuucauggga

SEQ ID NO: 470 - RNA, 19 nt, Artificial Sequence
  Synthetic
guuaugggucaugcggauu

SEQ ID NO: 471 - RNA, 19 nt, Artificial Sequence
  Synthetic
gccauaauuuaacagcaag

SEQ ID NO: 472 - RNA, 19 nt, Artificial Sequence
  Synthetic
uuccauuuuucuguauaag

SEQ ID NO: 473 - RNA, 19 nt, Artificial Sequence
  Synthetic
uuuauggggccuauauauu

SEQ ID NO: 474 - RNA, 19 nt, Artificial Sequence
  Synthetic
cauuucuucggcaguggcu

SEQ ID NO: 475 - RNA, 19 nt, Artificial Sequence
  Synthetic
aucacugugauauuuuguc

SEQ ID NO: 476 - RNA, 19 nt, Artificial Sequence
  Synthetic
uagaaauuugauauacuca

SEQ ID NO: 477 - RNA, 19 nt, Artificial Sequence
  Synthetic
aucuggucuuauugaccgu

SEQ ID NO: 478 - RNA, 19 nt, Artificial Sequence
  Synthetic
acuauacucagacauguua

SEQ ID NO: 479 - RNA, 19 nt, Artificial Sequence
  Synthetic
aaauauaugcaucugcuua

SEQ ID NO: 480 - RNA, 19 nt, Artificial Sequence
  Synthetic
acaaucuucuccaacauua

SEQ ID NO: 481 - RNA, 19 nt, Artificial Sequence
  Synthetic
gaguccaucaaacgcugga

SEQ ID NO: 482 - RNA, 19 nt, Artificial Sequence
  Synthetic
gagcugacaaaacucaaag

SEQ ID NO: 483 - RNA, 19 nt, Artificial Sequence
  Synthetic
aacugaaccgccaguugag

SEQ ID NO: 484 - RNA, 19 nt, Artificial Sequence
  Synthetic
uaacuucacagcuccagca

SEQ ID NO: 485 - RNA, 19 nt, Artificial Sequence
  Synthetic
aucagucuguugucgguuu

SEQ ID NO: 486 - RNA, 19 nt, Artificial Sequence
  Synthetic
agcccaauuaacagccaua

SEQ ID NO: 487 - RNA, 19 nt, Artificial Sequence
  Synthetic
agcaugauguaauccucca

SEQ ID NO: 488 - RNA, 19 nt, Artificial Sequence
  Synthetic
ugaugcuucguauuucuua

SEQ ID NO: 489 - RNA, 19 nt, Artificial Sequence
  Synthetic
auuaacguaacagaauccu

SEQ ID NO: 490 - RNA, 19 nt, Artificial Sequence
  Synthetic
gauggcaagcacaauauca

SEQ ID NO: 491 - RNA, 19 nt, Artificial Sequence
  Synthetic
auacuuuaguaauucaagg

SEQ ID NO: 492 - RNA, 19 nt, Artificial Sequence
  Synthetic
auauaagacucucugauga

SEQ ID NO: 493 - RNA, 19 nt, Artificial Sequence
  Synthetic
augaauaucuauaucaaua

SEQ ID NO: 494 - RNA, 19 nt, Artificial Sequence
  Synthetic
uucaacaccaucaccauga

SEQ ID NO: 495 - RNA, 19 nt, Artificial Sequence
  Synthetic
uguuguauaaaaagcuucu

SEQ ID NO: 496 - RNA, 19 nt, Artificial Sequence
  Synthetic
uaccgucauuacacgaucu

SEQ ID NO: 497 - RNA, 19 nt, Artificial Sequence
  Synthetic
cccauauuuauggaaugau

SEQ ID NO: 498 - RNA, 19 nt, Artificial Sequence
  Synthetic
ugugccaggaaaguauucc

SEQ ID NO: 499 - RNA, 19 nt, Artificial Sequence
  Synthetic
aauaucccucaagucuccu

SEQ ID NO: 500 - RNA, 19 nt, Artificial Sequence
  Synthetic
uuugccuuuuccagcacca

SEQ ID NO: 501 - RNA, 19 nt, Artificial Sequence
  Synthetic
aaaauugacagcauaguau

SEQ ID NO: 502 - RNA, 19 nt, Artificial Sequence
  Synthetic
uauaccaucacacauugga

SEQ ID NO: 503 - RNA, 19 nt, Artificial Sequence
  Synthetic
cccauaugacucaucaucu

SEQ ID NO: 504 - RNA, 19 nt, Artificial Sequence
  Synthetic
aauaggcuuaaauaucugc

SEQ ID NO: 505 - RNA, 19 nt, Artificial Sequence
  Synthetic
cuccaucaccuuugagaua

SEQ ID NO: 506 - RNA, 19 nt, Artificial Sequence
  Synthetic
agcacuagguugauacauc

SEQ ID NO: 507 - RNA, 19 nt, Artificial Sequence
  Synthetic
accacacuguaauaccaca

SEQ ID NO: 508 - RNA, 19 nt, Artificial Sequence
  Synthetic
accagauaaugagucugca

SEQ ID NO: 509 - RNA, 19 nt, Artificial Sequence
  Synthetic
gaaacaacccagucuauca

SEQ ID NO: 510 - RNA, 19 nt, Artificial Sequence
  Synthetic
accuuugacuguuagauug

SEQ ID NO: 511 - RNA, 19 nt, Artificial Sequence
  Synthetic
uucuacacauuuagcauga

SEQ ID NO: 512 - RNA, 19 nt, Artificial Sequence
  Synthetic
guuaaaaguuuuuacaacu

SEQ ID NO: 513 - RNA, 19 nt, Artificial Sequence
  Synthetic
aagcaucaguaaugguaag

SEQ ID NO: 514 - RNA, 19 nt, Artificial Sequence
  Synthetic
uguguagccaccuccucca

SEQ ID NO: 515 - RNA, 19 nt, Artificial Sequence
  Synthetic
ucgagcaacauuacggauu

SEQ ID NO: 516 - RNA, 19 nt, Artificial Sequence
  Synthetic
agucucauauguccaacau

SEQ ID NO: 517 - RNA, 19 nt, Artificial Sequence
  Synthetic
acaaucaagggcaacugca

SEQ ID NO: 518 - RNA, 19 nt, Artificial Sequence
  Synthetic
caacucauugggaaucuca

SEQ ID NO: 519 - RNA, 19 nt, Artificial Sequence
  Synthetic
aaaguaaucauuauauggc

SEQ ID NO: 520 - RNA, 19 nt, Artificial Sequence
  Synthetic
gucugguccaaaauacuca

SEQ ID NO: 521 - RNA, 19 nt, Artificial Sequence
  Synthetic
acuaauaugcaguuugaag

SEQ ID NO: 522 - RNA, 19 nt, Artificial Sequence
  Synthetic
guuugucauguuugaagga

SEQ ID NO: 523 - RNA, 19 nt, Artificial Sequence
  Synthetic
auauucuggaguguucugg

SEQ ID NO: 524 - RNA, 19 nt, Artificial Sequence
  Synthetic
cuguuuuaucuuuuccaua

SEQ ID NO: 525 - RNA, 19 nt, Artificial Sequence
  Synthetic
caaauuuucaaacaaacgc

SEQ ID NO: 526 - RNA, 19 nt, Artificial Sequence
  Synthetic
ugcaugagguaacaugcgc

SEQ ID NO: 527 - RNA, 19 nt, Artificial Sequence
  Synthetic
uugcaucuggacaccaggu

SEQ ID NO: 528 - RNA, 19 nt, Artificial Sequence
  Synthetic
agcaucuucuggaauagcu

SEQ ID NO: 529 - RNA, 19 nt, Artificial Sequence
  Synthetic
uccacugucuucaugaaca

SEQ ID NO: 530 - RNA, 19 nt, Artificial Sequence
  Synthetic
aucuucuccaucuucaucu

SEQ ID NO: 531 - RNA, 19 nt, Artificial Sequence
  Synthetic
agaaauucucuugucugga

SEQ ID NO: 532 - RNA, 19 nt, Artificial Sequence
  Synthetic
cuugucugaugcucgaaua

SEQ ID NO: 533 - RNA, 19 nt, Artificial Sequence
  Synthetic
uucaucacaagcuauccgc

SEQ ID NO: 534 - RNA, 19 nt, Artificial Sequence
  Synthetic
cucagaaucugagaauucu

SEQ ID NO: 535 - RNA, 19 nt, Artificial Sequence
  Synthetic
accuccuucuccuucaucc

SEQ ID NO: 536 - RNA, 19 nt, Artificial Sequence
  Synthetic
aucagccacauuucuucga

SEQ ID NO: 537 - RNA, 19 nt, Artificial Sequence
  Synthetic
cuuugcuccuuucuuauga

SEQ ID NO: 538 - RNA, 19 nt, Artificial Sequence
  Synthetic
uucuucaauucuagcuuuc

SEQ ID NO: 539 - RNA, 19 nt, Artificial Sequence
  Synthetic
cucuguuucuuucuuaucu

SEQ ID NO: 540 - RNA, 19 nt, Artificial Sequence
  Synthetic
aacgucuguuuuuuugucc

SEQ ID NO: 541 - RNA, 19 nt, Artificial Sequence
  Synthetic
ggauuuaucuucuuccuua

SEQ ID NO: 542 - RNA, 19 nt, Artificial Sequence
  Synthetic
uucaccacuguuguccuug

SEQ ID NO: 543 - RNA, 19 nt, Artificial Sequence
  Synthetic
uccuuugguaucuguuuuu

SEQ ID NO: 544 - RNA, 19 nt, Artificial Sequence
  Synthetic
gagcuguucugauuugguu

SEQ ID NO: 545 - RNA, 19 nt, Artificial Sequence
  Synthetic
ucaaauucagggguugcug

SEQ ID NO: 546 - RNA, 19 nt, Artificial Sequence
  Synthetic
cugaaauuggugagacugu

SEQ ID NO: 547 - RNA, 19 nt, Artificial Sequence
  Synthetic
uuucuuuuuaaugauuuuc

SEQ ID NO: 548 - RNA, 19 nt, Artificial Sequence
  Synthetic
acauuuuccuuucaauauu

SEQ ID NO: 549 - RNA, 19 nt, Artificial Sequence
  Synthetic
gaagucuucaaaaagaaaa

SEQ ID NO: 550 - RNA, 19 nt, Artificial Sequence
  Synthetic
uaguauaaaaugaagccag

SEQ ID NO: 551 - RNA, 19 nt, Artificial Sequence
  Synthetic
auacaguccaugccaaagu

SEQ ID NO: 552 - RNA, 19 nt, Artificial Sequence
  Synthetic
agucccauuugaaaauaaa

SEQ ID NO: 553 - RNA, 19 nt, Artificial Sequence
  Synthetic
gaaaaacaaaaacgaaaaa

SEQ ID NO: 554 - RNA, 19 nt, Artificial Sequence
  Synthetic
cacaauaaaacuugcccag

SEQ ID NO: 555 - RNA, 19 nt, Artificial Sequence
  Synthetic
uucauaauuagaaaaucuc

SEQ ID NO: 556 - RNA, 19 nt, Artificial Sequence
  Synthetic
ggagaaaagaaauuuugcu

SEQ ID NO: 557 - RNA, 19 nt, Artificial Sequence
  Synthetic
uaucacauaaagcauggug

SEQ ID NO: 558 - RNA, 19 nt, Artificial Sequence
  Synthetic
cacaucaauuuuaaauacu

SEQ ID NO: 559 - RNA, 19 nt, Artificial Sequence
  Synthetic
uuuuuugacauaauaacuc

SEQ ID NO: 560 - RNA, 19 nt, Artificial Sequence
  Synthetic
cuucuuuaauagaucaguu

SEQ ID NO: 561 - RNA, 19 nt, Artificial Sequence
  Synthetic
gcucagaaaggccaauuac

SEQ ID NO: 562 - RNA, 19 nt, Artificial Sequence
  Synthetic
uuuuuuuuuuuuuuuucag

SEQ ID NO: 563 - RNA, 23 nt, Artificial Sequence
  Synthetic
gaggcggcaaaaaaaaagucugc

SEQ ID NO: 564 - RNA, 23 nt, Artificial Sequence
  Synthetic
cucucaacuggcgguucaguugc

SEQ ID NO: 565 - RNA, 23 nt, Artificial Sequence
  Synthetic
aucguguaaugacgguaucauuc

SEQ ID NO: 566 - RNA, 23 nt, Artificial Sequence
  Synthetic
ucguguaaugacgguaucauucc

SEQ ID NO: 567 - RNA, 23 nt, Artificial Sequence
  Synthetic
gugauagacuggguuguuucaau

SEQ ID NO: 568 - RNA, 23 nt, Artificial Sequence
  Synthetic
gagauguaucaaccuagugcugu

SEQ ID NO: 569 - RNA, 23 nt, Artificial Sequence
  Synthetic
uacaguguggugcagacucauua

SEQ ID NO: 570 - RNA, 23 nt, Artificial Sequence
  Synthetic
aacagaucguguaaugacgguau

SEQ ID NO: 571 - DNA, 21 bp, Artificial Sequence
  Synthetic
ggcggcaaaaaaaaagucutt

SEQ ID NO: 572 - DNA, 21 bp, Artificial Sequence
  Synthetic
cucaacuggcgguucaguutt

SEQ ID NO: 573 - DNA, 21 bp, Artificial Sequence
  Synthetic
cguguaaugacgguaucautt

SEQ ID NO: 574 - DNA, 21 bp, Artificial Sequence
  Synthetic
guguaaugacgguaucauutt

SEQ ID NO: 575 - DNA, 21 bp, Artificial Sequence
  Synthetic
gauagacuggguuguuucatt

SEQ ID NO: 576 - DNA, 21 bp, Artificial Sequence
  Synthetic
gauguaucaaccuagugcutt

SEQ ID NO: 577 - DNA, 21 bp, Artificial Sequence
  Synthetic
caguguggugcagacucautt

SEQ ID NO: 578 - DNA, 21 bp, Artificial Sequence
  Synthetic
cagaucguguaaugacggutt

SEQ ID NO: 579 - DNA, 21 bp, Artificial Sequence
  Synthetic
agacuuuuuuuuugccgcctt

SEQ ID NO: 580 - DNA, 21 bp, Artificial Sequence
  Synthetic
aacugaaccgccaguugagtt

SEQ ID NO: 581 - DNA, 21 bp, Artificial Sequence
  Synthetic
augauaccgucauuacacgtt

SEQ ID NO: 582 - DNA, 21 bp, Artificial Sequence
  Synthetic
aaugauaccgucauuacactt

SEQ ID NO: 583 - DNA, 21 bp, Artificial Sequence
  Synthetic
ugaaacaacccagucuauctt

SEQ ID NO: 584 - DNA, 21 bp, Artificial Sequence
  Synthetic
agcacuagguugauacauctt

SEQ ID NO: 585 - DNA, 21 bp, Artificial Sequence
  Synthetic
augagucugcaccacacugtt

SEQ ID NO: 586 - DNA, 21 bp, Artificial Sequence
  Synthetic
accgucauuacacgaucugtt

SEQ ID NO: 587 - DNA, 21 bp, Artificial Sequence
  Synthetic
  misc_feature (1)..(1): 5'-3 attached inverted deoxyabasic moiety.
  misc_feature (3)..(3): 2'-deoxy-2'-fluoro
  misc_feature (6)..(6): 2'-deoxy-2'-fluoro
  misc_feature (17)..(19): 2'-deoxy-2'-fluoro
  misc_feature (21)..(21): 3'-3 attached inverted deoxyabasic moiety.
ggcggcaaaaaaaaagucutt

SEQ ID NO: 588 - DNA, 21 bp, Artificial Sequence
  Synthetic
  misc_feature (1)..(1): 5'-3 attached inverted deoxyabasic moiety.
  misc_feature (1)..(3): 2'-deoxy-2'-fluoro
  misc_feature (6)..(7): 2'-deoxy-2'-fluoro
  misc_feature (10)..(10): 2'-deoxy-2'-fluoro
  misc_feature (13)..(15): 2'-deoxy-2'-fluoro
  misc_feature (18)..(19): 2'-deoxy-2'-fluoro
  misc_feature (21)..(21): 3'-3 attached inverted deoxyabasic moiety.
cucaacuggcgguucaguutt

SEQ ID NO: 589 - DNA, 21 bp, Artificial Sequence
  Synthetic
  misc_feature (1)..(1): 5'-3 attached inverted deoxyabasic moiety.
  misc_feature (1)..(1): 2'-deoxy-2'-fluoro
  misc_feature (3)..(3): 2'-deoxy-2'-fluoro
  misc_feature (5)..(5): 2'-deoxy-2'-fluoro
  misc_feature (8)..(8): 2'-deoxy-2'-fluoro
  misc_feature (11)..(11): 2'-deoxy-2'-fluoro
  misc_feature (14)..(14): 2'-deoxy-2'-fluoro
  misc_feature (16)..(17): 2'-deoxy-2'-fluoro
  misc_feature (19)..(19): 2'-deoxy-2'-fluoro
  misc_feature (21)..(21): 3'-3 attached inverted deoxyabasic moiety.
cguguaaugacgguaucautt

SEQ ID NO: 590 - DNA, 21 bp, Artificial Sequence
  Synthetic
  misc_feature (1)..(1): 5'-3 attached inverted deoxyabasic moiety.
  misc_feature (2)..(2): 2'-deoxy-2'-fluoro
  misc_feature (4)..(4): 2'-deoxy-2'-fluoro
  misc_feature (7)..(7): 2'-deoxy-2'-fluoro
  misc_feature (10)..(10): 2'-deoxy-2'-fluoro
  misc_feature (13)..(13): 2'-deoxy-2'-fluoro
  misc_feature (15)..(16): 2'-deoxy-2'-fluoro
  misc_feature (18)..(19): 2'-deoxy-2'-fluoro
  misc_feature (21)..(21): 3'-3 attached inverted deoxyabasic moiety.
guguaaugacgguaucauutt

SEQ ID NO: 591 - DNA, 21 bp, Artificial Sequence
  Synthetic
  misc_feature (1)..(1): 5'-3 attached inverted deoxyabasic moiety.
  misc_feature (3)..(3): 2'-deoxy-2'-fluoro
  misc_feature (7)..(8): 2'-deoxy-2'-fluoro
  misc_feature (12)..(13): 2'-deoxy-2'-fluoro
  misc_feature (15)..(18): 2'-deoxy-2'-fluoro
  misc_feature (21)..(21): 3'-3 attached inverted deoxyabasic moiety.
gauagacuggguuguuucatt

SEQ ID NO: 592 - DNA, 21 bp, Artificial Sequence
  Synthetic
  misc_feature (1)..(1): 5'-3 attached inverted deoxyabasic moiety.
  misc_feature (3)..(3): 2'-deoxy-2'-fluoro
  misc_feature (5)..(5): 2'-deoxy-2'-fluoro
  misc_feature (7)..(8): 2'-deoxy-2'-fluoro
  misc_feature (11)..(13): 2'-deoxy-2'-fluoro
  misc_feature (16)..(16): 2'-deoxy-2'-fluoro
  misc_feature (18)..(19): 2'-deoxy-2'-fluoro
  misc_feature (21)..(21): 3'-3 attached inverted deoxyabasic moiety.
gauguaucaaccuagugcutt

SEQ ID NO: 593 - DNA, 21 bp, Artificial Sequence
  Synthetic
  misc_feature (1)..(1): 5'-3 attached inverted deoxyabasic moiety.
  misc_feature (1)..(1): 2'-deoxy-2'-fluoro
  misc_feature (4)..(4): 2'-deoxy-2'-fluoro
  misc_feature (6)..(6): 2'-deoxy-2'-fluoro
  misc_feature (9)..(9): 2'-deoxy-2'-fluoro
  misc_feature (11)..(11): 2'-deoxy-2'-fluoro
  misc_feature (15)..(17): 2'-deoxy-2'-fluoro
  misc_feature (19)..(19): 2'-deoxy-2'-fluoro
  misc_feature (21)..(21): 3'-3 attached inverted deoxyabasic moiety.
caguguggugcagacucautt

SEQ ID NO: 594 - DNA, 21 bp, Artificial Sequence
  Synthetic
  misc_feature (1)..(1): 5'-3 attached inverted deoxyabasic moiety.
  misc_feature (1)..(1): 2'-deoxy-2'-fluoro
  misc_feature (5)..(6): 2'-deoxy-2'-fluoro
  misc_feature (8)..(8): 2'-deoxy-2'-fluoro
  misc_feature (10)..(10): 2'-deoxy-2'-fluoro
  misc_feature (13)..(13): 2'-deoxy-2'-fluoro
  misc_feature (16)..(16): 2'-deoxy-2'-fluoro
  misc_feature (19)..(19): 2'-deoxy-2'-fluoro
  misc_feature (21)..(21): 3'-3 attached inverted deoxyabasic moiety.
cagaucguguaaugacggutt

SEQ ID NO: 595 - DNA, 21 bp, Artificial Sequence
  Synthetic
  misc_feature (4)..(13): 2'-deoxy-2'-fluoro
  misc_feature (15)..(16): 2'-deoxy-2'-fluoro
  misc_feature (18)..(19): 2'-deoxy-2'-fluoro
  misc_feature (20)..(21): phosphorothioate linkage
agacuuuuuuuuugccgcctt

SEQ ID NO: 596 - DNA, 21 bp, Artificial Sequence
  Synthetic
  misc_feature (3)..(4): 2'-deoxy-2'-fluoro
  misc_feature (8)..(9): 2'-deoxy-2'-fluoro
  misc_feature (11)..(12): 2'-deoxy-2'-fluoro
  misc_feature (15)..(16): 2'-deoxy-2'-fluoro
  misc_feature (20)..(21): phosphorothioate linkage
aacugaaccgccaguugagtt

SEQ ID NO: 597 - DNA, 21 bp, Artificial Sequence
  Synthetic
  misc_feature (2)..(2): 2'-deoxy-2'-fluoro
  misc_feature (5)..(5): 2'-deoxy-2'-fluoro
  misc_feature (7)..(8): 2'-deoxy-2'-fluoro
  misc_feature (10)..(11): 2'-deoxy-2'-fluoro
  misc_feature (13)..(14): 2'-deoxy-2'-fluoro
  misc_feature (16)..(16): 2'-deoxy-2'-fluoro
  misc_feature (18)..(18): 2'-deoxy-2'-fluoro
  misc_feature (20)..(21): phosphorothioate linkage
augauaccgucauuacacgtt

SEQ ID NO: 598 - DNA, 21 bp, Artificial Sequence
  Synthetic
  misc_feature (3)..(3): 2'-deoxy-2'-fluoro
  misc_feature (6)..(6): 2'-deoxy-2'-fluoro
  misc_feature (8)..(9): 2'-deoxy-2'-fluoro
  misc_feature (11)..(12): 2'-deoxy-2'-fluoro
  misc_feature (14)..(15): 2'-deoxy-2'-fluoro
  misc_feature (17)..(17): 2'-deoxy-2'-fluoro
  misc_feature (19)..(19): 2'-deoxy-2'-fluoro
  misc_feature (20)..(21): phosphorothioate linkage
aaugauaccgucauuacactt

SEQ ID NO: 599 - DNA, 21 bp, Artificial Sequence
  Synthetic
  misc_feature (1)..(1): 2'-deoxy-2'-fluoro
  misc_feature (6)..(6): 2'-deoxy-2'-fluoro
  misc_feature (9)..(11): 2'-deoxy-2'-fluoro
  misc_feature (14)..(16): 2'-deoxy-2'-fluoro
  misc_feature (18)..(19): 2'-deoxy-2'-fluoro
  misc_feature (20)..(21): phosphorothioate linkage
ugaaacaacccagucuauctt

SEQ ID NO: 600 - DNA, 21 bp, Artificial Sequence
  Synthetic
  misc_feature (3)..(3): 2'-deoxy-2'-fluoro
  misc_feature (5)..(6): 2'-deoxy-2'-fluoro
  misc_feature (10)..(11): 2'-deoxy-2'-fluoro
  misc_feature (14)..(14): 2'-deoxy-2'-fluoro
  misc_feature (16)..(16): 2'-deoxy-2'-fluoro
  misc_feature (18)..(19): 2'-deoxy-2'-fluoro
  misc_feature (20)..(21): phosphorothioate linkage
agcacuagguugauacauctt

SEQ ID NO: 601 - DNA, 21 bp, Artificial Sequence
  Synthetic
  misc_feature (2)..(2): 2'-deoxy-2'-fluoro
  misc_feature (6)..(8): 2'-deoxy-2'-fluoro
  misc_feature (10)..(10): 2'-deoxy-2'-fluoro
  misc_feature (12)..(13): 2'-deoxy-2'-fluoro
  misc_feature (15)..(15): 2'-deoxy-2'-fluoro
  misc_feature (17)..(18): 2'-deoxy-2'-fluoro
  misc_feature (20)..(21): phosphorothioate linkage
augagucugcaccacacugtt

SEQ ID NO: 602 - DNA, 21 bp, Artificial Sequence
  Synthetic
  misc_feature (2)..(3): 2'-deoxy-2'-fluoro
  misc_feature (5)..(6): 2'-deoxy-2'-fluoro
  misc_feature (8)..(9): 2'-deoxy-2'-fluoro
  misc_feature (11)..(11): 2'-deoxy-2'-fluoro
  misc_feature (13)..(13): 2'-deoxy-2'-fluoro
  misc_feature (16)..(18): 2'-deoxy-2'-fluoro
  misc_feature (20)..(21): phosphorothioate linkage
accgucauuacacgaucugtt

SEQ ID NO: 603 - DNA, 21 bp, Artificial Sequence
  Synthetic
  misc_feature (1)..(1): 5'-3 attached inverted deoxyabasic moiety.
  misc_feature (1)..(2): deoxy
  misc_feature (3)..(3): 2'-deoxy-2'-fluoro
  misc_feature (4)..(5): deoxy
  misc_feature (6)..(6): 2'-deoxy-2'-fluoro
  misc_feature (7)..(16): deoxy
  misc_feature (17)..(19): 2'-deoxy-2'-fluoro
  misc_feature (21)..(21): 3'-3 attached inverted deoxyabasic moiety.
ggcggcaaaaaaaaagucutt

SEQ ID NO: 604 - DNA, 21 bp, Artificial Sequence
  Synthetic
  misc_feature (1)..(1): 5'-3 attached inverted deoxyabasic moiety.
  misc_feature (1)..(3): 2'-deoxy-2'-fluoro
  misc_feature (4)..(5): deoxy
  misc_feature (6)..(7): 2'-deoxy-2'-fluoro
  misc_feature (8)..(9): deoxy
  misc_feature (10)..(10): 2'-deoxy-2'-fluoro
  misc_feature (11)..(12): deoxy
  misc_feature (13)..(15): 2'-deoxy-2'-fluoro
  misc_feature (16)..(17): deoxy
  misc_feature (18)..(19): 2'-deoxy-2'-fluoro
  misc_feature (21)..(21): 3'-3 attached inverted deoxyabasic moiety.
cucaacuggcgguucaguutt

SEQ ID NO: 605 - DNA, 21 bp, Artificial Sequence
  Synthetic
  misc_feature (1)..(1): 5'-3 attached inverted deoxyabasic moiety.
  misc_feature (1)..(1): 2'-deoxy-2'-fluoro
  misc_feature (2)..(2): deoxy
  misc_feature (3)..(3): 2'-deoxy-2'-fluoro
  misc_feature (4)..(4): deoxy
  misc_feature (5)..(5): 2'-deoxy-2'-fluoro
  misc_feature (6)..(7): deoxy
  misc_feature (8)..(8): 2'-deoxy-2'-fluoro
  misc_feature (9)..(10): deoxy
  misc_feature (11)..(11): 2'-deoxy-2'-fluoro
  misc_feature (12)..(13): deoxy
  misc_feature (14)..(14): 2'-deoxy-2'-fluoro
  misc_feature (15)..(15): deoxy
  misc_feature (16)..(17): 2'-deoxy-2'-fluoro
  misc_feature (18)..(18): deoxy
  misc_feature (19)..(19): 2'-deoxy-2'-fluoro
  misc_feature (21)..(21): 3'-3 attached inverted deoxyabasic moiety.
cguguaaugacgguaucautt

SEQ ID NO: 606 - DNA, 21 bp, Artificial Sequence
  Synthetic
  misc_feature (1)..(1): 5'-3 attached inverted deoxyabasic moiety.
  misc_feature (1)..(1): deoxy
  misc_feature (2)..(2): 2'-deoxy-2'-fluoro
  misc_feature (3)..(3): deoxy
  misc_feature (4)..(4): 2'-deoxy-2'-fluoro
  misc_feature (5)..(6): deoxy
  misc_feature (7)..(7): 2'-deoxy-2'-fluoro
  misc_feature (8)..(9): deoxy
  misc_feature (10)..(10): 2'-deoxy-2'-fluoro
  misc_feature (11)..(12): deoxy
  misc_feature (13)..(13): 2'-deoxy-2'-fluoro
  misc_feature (14)..(14): deoxy
  misc_feature (15)..(16): 2'-deoxy-2'-fluoro
  misc_feature (17)..(17): deoxy
  misc_feature (18)..(19): 2'-deoxy-2'-fluoro
  misc_feature (21)..(21): 3'-3 attached inverted deoxyabasic moiety.
guguaaugacgguaucauutt

SEQ ID NO: 607 - DNA, 21 bp, Artificial Sequence
  Synthetic
  misc_feature (1)..(1): 5'-3 attached inverted deoxyabasic moiety.
  misc_feature (1)..(2): deoxy
  misc_feature (3)..(3): 2'-deoxy-2'-fluoro
  misc_feature (4)..(6): deoxy
  misc_feature (7)..(8): 2'-deoxy-2'-fluoro
  misc_feature (9)..(11): deoxy
  misc_feature (12)..(13): 2'-deoxy-2'-fluoro
  misc_feature (14)..(14): deoxy
  misc_feature (15)..(18): 2'-deoxy-2'-fluoro
  misc_feature (19)..(19): deoxy
  misc_feature (21)..(21): 3'-3 attached inverted deoxyabasic moiety.
gauagacuggguuguuucatt

SEQ ID NO: 608 - DNA, 21 bp, Artificial Sequence
  Synthetic
  misc_feature (1)..(1): 5'-3 attached inverted deoxyabasic moiety.
  misc_feature (1)..(2): deoxy
  misc_feature (3)..(3): 2'-deoxy-2'-fluoro
  misc_feature (4)..(4): deoxy
  misc_feature (5)..(5): 2'-deoxy-2'-fluoro
  misc_feature (6)..(6): deoxy
  misc_feature (7)..(8): 2'-deoxy-2'-fluoro
  misc_feature (9)..(10): deoxy
  misc_feature (11)..(13): 2'-deoxy-2'-fluoro
  misc_feature (14)..(15): deoxy
  misc_feature (16)..(16): 2'-deoxy-2'-fluoro
  misc_feature (17)..(17): deoxy
  misc_feature (18)..(19): 2'-deoxy-2'-fluoro
  misc_feature (21)..(21): 3'-3 attached inverted deoxyabasic moiety.
gauguaucaaccuagugcutt

SEQ ID NO: 609 - DNA, 21 bp, Artificial Sequence
  Synthetic
  misc_feature (1)..(1): 5'-3 attached inverted deoxyabasic moiety.
  misc_feature (1)..(1): 2'-deoxy-2'-fluoro
  misc_feature (2)..(3): deoxy
  misc_feature (4)..(4): 2'-deoxy-2'-fluoro
  misc_feature (5)..(5): deoxy
  misc_feature (6)..(6): 2'-deoxy-2'-fluoro
  misc_feature (7)..(8): deoxy
  misc_feature (9)..(9): 2'-deoxy-2'-fluoro
  misc_feature (10)..(10): deoxy
  misc_feature (11)..(11): 2'-deoxy-2'-fluoro
  misc_feature (12)..(14): deoxy
  misc_feature (15)..(17): 2'-deoxy-2'-fluoro
  misc_feature (18)..(18): deoxy
  misc_feature (19)..(19): 2'-deoxy-2'-fluoro
  misc_feature (21)..(21): 3'-3 attached inverted deoxyabasic moiety.
caguguggugcagacucautt

SEQ ID NO: 610 - DNA, 21 bp, Artificial Sequence
  Synthetic
  misc_feature (1)..(1): 5'-3 attached inverted deoxyabasic moiety.
  misc_feature (1)..(1): 2'-deoxy-2'-fluoro
  misc_feature (2)..(4): deoxy
  misc_feature (5)..(6): 2'-deoxy-2'-fluoro
  misc_feature (7)..(7): deoxy
  misc_feature (8)..(8): 2'-deoxy-2'-fluoro
  misc_feature (9)..(9): deoxy
  misc_feature (10)..(10): 2'-deoxy-2'-fluoro
  misc_feature (11)..(12): deoxy
  misc_feature (13)..(13): 2'-deoxy-2'-fluoro
  misc_feature (14)..(15): deoxy
  misc_feature (16)..(16): 2'-deoxy-2'-fluoro
  misc_feature (17)..(18): deoxy
  misc_feature (19)..(19): 2'-deoxy-2'-fluoro
  misc_feature (21)..(21): 3'-3 attached inverted deoxyabasic moiety.
cagaucguguaaugacggutt

SEQ ID NO: 611 - DNA, 21 bp, Artificial Sequence
  Synthetic
  misc_feature (1)..(3): deoxy
  misc_feature (4)..(13): 2'-deoxy-2'-fluoro
  misc_feature (14)..(14): deoxy
  misc_feature (15)..(16): 2'-deoxy-2'-fluoro
  misc_feature (17)..(17): deoxy
  misc_feature (18)..(19): 2'-deoxy-2'-fluoro
  misc_feature (20)..(21): phosphorothioate linkage
agacuuuuuuuuugccgcctt

SEQ ID NO: 612 - DNA, 21 bp, Artificial Sequence
  Synthetic
  misc_feature (1)..(2): deoxy
  misc_feature (3)..(4): 2'-deoxy-2'-fluoro
  misc_feature (5)..(7): deoxy
  misc_feature (8)..(9): 2'-deoxy-2'-fluoro
  misc_feature (10)..(10): deoxy
  misc_feature (11)..(12): 2'-deoxy-2'-fluoro
  misc_feature (13)..(14): deoxy
  misc_feature (15)..(16): 2'-deoxy-2'-fluoro
  misc_feature (17)..(19): deoxy
  misc_feature (20)..(21): phosphorothioate linkage
aacugaaccgccaguugagtt

SEQ ID NO: 613 - DNA, 21 bp, Artificial Sequence
  Synthetic
  misc_feature (1)..(1): deoxy
  misc_feature (2)..(2): 2'-deoxy-2'-fluoro
  misc_feature (3)..(4): deoxy
  misc_feature (5)..(5): 2'-deoxy-2'-fluoro
  misc_feature (6)..(6): deoxy
  misc_feature (7)..(8): 2'-deoxy-2'-fluoro
  misc_feature (9)..(9): deoxy
  misc_feature (10)..(11): 2'-deoxy-2'-fluoro
  misc_feature (12)..(12): deoxy
  misc_feature (13)..(14): 2'-deoxy-2'-fluoro
  misc_feature (15)..(15): deoxy
  misc_feature (16)..(16): 2'-deoxy-2'-fluoro
  misc_feature (17)..(17): deoxy
  misc_feature (18)..(18): 2'-deoxy-2'-fluoro
  misc_feature (19)..(19): deoxy
  misc_feature (20)..(21): phosphorothioate linkage
augauaccgucauuacacgtt

SEQ ID NO: 614 - DNA, 21 bp, Artificial Sequence
  Synthetic
  misc_feature (1)..(2): deoxy
  misc_feature (3)..(3): 2'-deoxy-2'-fluoro
  misc_feature (4)..(5): deoxy
  misc_feature (6)..(6): 2'-deoxy-2'-fluoro
  misc_feature (7)..(7): deoxy
  misc_feature (8)..(9): 2'-deoxy-2'-fluoro
  misc_feature (10)..(10): deoxy
  misc_feature (11)..(12): 2'-deoxy-2'-fluoro
  misc_feature (13)..(13): deoxy
  misc_feature (14)..(15): 2'-deoxy-2'-fluoro
  misc_feature (16)..(16): deoxy
  misc_feature (17)..(17): 2'-deoxy-2'-fluoro
  misc_feature (18)..(18): deoxy
  misc_feature (19)..(19): 2'-deoxy-2'-fluoro
  misc_feature (20)..(21): phosphorothioate linkage
aaugauaccgucauuacactt

SEQ ID NO: 615 - DNA, 21 bp, Artificial Sequence
  Synthetic
  misc_feature (1)..(1): 2'-deoxy-2'-fluoro
  misc_feature (2)..(5): deoxy
  misc_feature (6)..(6): 2'-deoxy-2'-fluoro
  misc_feature (7)..(8): deoxy
  misc_feature (9)..(11): 2'-deoxy-2'-fluoro
  misc_feature (12)..(13): deoxy
  misc_feature (14)..(16): 2'-deoxy-2'-fluoro
  misc_feature (17)..(17): deoxy
  misc_feature (18)..(19): 2'-deoxy-2'-fluoro
  misc_feature (20)..(21): phosphorothoiate linkage
ugaaacaacccagucuauctt

SEQ ID NO: 616 - DNA, 21 bp, Artificial Sequence
  Synthetic
  misc_feature (1)..(2): deoxy
  misc_feature (3)..(3): 2'-deoxy-2'-fluoro
  misc_feature (4)..(4): deoxy
  misc_feature (5)..(6): 2'-deoxy-2'-fluoro
  misc_feature (7)..(9): deoxy
  misc_feature (10)..(11): 2'-deoxy-2'-fluoro
  misc_feature (12)..(13): deoxy
  misc_feature (14)..(14): 2'-deoxy-2'-fluoro
  misc_feature (15)..(15): deoxy
  misc_feature (16)..(16): 2'-deoxy-2'-fluoro
  misc_feature (17)..(17): deoxy
  misc_feature (18)..(19): 2'-deoxy-2'-fluoro
  misc_feature (20)..(21): phosphorothioate linkage
agcacuagguugauacauctt

SEQ ID NO: 617 - DNA, 21 bp, Artificial Sequence
  Synthetic
  misc_feature (1)..(1): deoxy
  misc_feature (2)..(2): 2'-deoxy-2'-fluoro
  misc_feature (3)..(5): deoxy
  misc_feature (6)..(8): 2'-deoxy-2'-fluoro
  misc_feature (9)..(9): deoxy
  misc_feature (10)..(10): 2'-deoxy-2'-fluoro
  misc_feature (11)..(11): deoxy
  misc_feature (12)..(13): 2'-deoxy-2'-fluoro
  misc_feature (14)..(14): deoxy
  misc_feature (15)..(15): 2'-deoxy-2'-fluoro
  misc_feature (16)..(16): deoxy
  misc_feature (17)..(18): 2'-deoxy-2'-fluoro
  misc_feature (19)..(19): deoxy
  misc_feature (20)..(21): phosphorothioate linkage
augagucugcaccacacugtt

SEQ ID NO: 618 - DNA, 21 bp, Artificial Sequence
  Synthetic
  misc_feature (1)..(1): deoxy
  misc_feature (2)..(3): 2'-deoxy-2'-fluoro
  misc_feature (4)..(4): deoxy
  misc_feature (5)..(6): 2'-deoxy-2'-fluoro
  misc_feature (7)..(7): deoxy
  misc_feature (8)..(9): 2'-deoxy-2'-fluoro
  misc_feature (10)..(10): deoxy
  misc_feature (11)..(11): 2'-deoxy-2'-fluoro
  misc_feature (12)..(12): deoxy
  misc_feature (13)..(13): 2'-deoxy-2'-fluoro
  misc_feature (14)..(15): deoxy
  misc_feature (16)..(18): 2'-deoxy-2'-fluoro
  misc_feature (19)..(19): deoxy
  misc_feature (20)..(21): phosphorothioate linkage
accgucauuacacgaucugtt

SEQ ID NO: 619 - DNA, 21 bp, Artificial Sequence
  Synthetic
  misc_feature (1)..(1): 5'-3 attached inverted deoxyabasic moiety.
  misc_feature (1)..(2): 2'-O-methyl
  misc_feature (3)..(3): 2'-deoxy-2'-fluoro
  misc_feature (4)..(5): 2'-O-methyl
  misc_feature (6)..(6): 2'-deoxy-2'-fluoro
  misc_feature (7)..(16): 2'-O-methyl
  misc_feature (17)..(19): 2'-deoxy-2'-fluoro
  misc_feature (21)..(21): 3'-3 attached inverted deoxyabasic moiety.
ggcggcaaaaaaaaagucutt

SEQ ID NO: 620 - DNA, 21 bp, Artificial Sequence
  Synthetic
  misc_feature (1)..(1): 5'-3 attached inverted deoxyabasic moiety.
  misc_feature (1)..(3): 2'-deoxy-2'-fluoro
  misc_feature (4)..(5): 2'-O-methyl
  misc_feature (6)..(7): 2'-deoxy-2'-fluoro
  misc_feature (8)..(9): 2'-O-methyl
  misc_feature (10)..(10): 2'-deoxy-2'-fluoro
  misc_feature (11)..(12): 2'-O-methyl
  misc_feature (13)..(15): 2'-deoxy-2'-fluoro
  misc_feature (16)..(17): 2'-O-methyl
  misc_feature (18)..(19): 2'-deoxy-2'-fluoro
  misc_feature (21)..(21): 3'-3 attached inverted deoxyabasic moiety.
cucaacuggcgguucaguutt

SEQ ID NO: 621 - DNA, 21 bp, Artificial Sequence
  Synthetic
  misc_feature (1)..(1): 5'-3 attached inverted deoxyabasic moiety.
  misc_feature (1)..(1): 2'-deoxy-2'-fluoro
  misc_feature (2)..(2): 2'-O-methyl
  misc_feature (3)..(3): 2'-deoxy-2'-fluoro
  misc_feature (4)..(4): 2'-O-methyl
  misc_feature (5)..(5): 2'-deoxy-2'-fluoro
  misc_feature (6)..(7): 2'-O-methyl
  misc_feature (8)..(8): 2'-deoxy-2'-fluoro
  misc_feature (9)..(10): 2'-O-methyl
  misc_feature (11)..(11): 2'-deoxy-2'-fluoro
  misc_feature (12)..(13): 2'-O-methyl
  misc_feature (14)..(14): 2'-deoxy-2'-fluoro
  misc_feature (15)..(15): 2'-O-methyl
  misc_feature (16)..(17): 2'-deoxy-2'-fluoro
  misc_feature (18)..(18): 2'-O-methyl
  misc_feature (19)..(19): 2'-deoxy-2'-fluoro
  misc_feature (21)..(21): 3'-3 attached inverted deoxyabasic moiety.
cguguaaugacgguaucautt

SEQ ID NO: 622 - DNA, 21 bp, Artificial Sequence
  Synthetic
  misc_feature (1)..(1): 5'-3 attached inverted deoxyabasic moiety.
  misc_feature (1)..(1): 2'-O-methyl
  misc_feature (2)..(2): 2'-deoxy-2'-fluoro
  misc_feature (3)..(3): 2'-O-methyl
  misc_feature (4)..(4): 2'-deoxy-2'-fluoro
  misc_feature (5)..(6): 2'-O-methyl
  misc_feature (7)..(7): 2'-deoxy-2'-fluoro
  misc_feature (8)..(9): 2'-O-methyl
  misc_feature (10)..(10): 2'-deoxy-2'-fluoro
  misc_feature (11)..(12): 2'-O-methyl
  misc_feature (13)..(13): 2'-deoxy-2'-fluoro
  misc_feature (14)..(14): 2'-O-methyl
  misc_feature (15)..(16): 2'-deoxy-2'-fluoro
  misc_feature (17)..(17): 2'-O-methyl
  misc_feature (18)..(19): 2'-deoxy-2'-fluoro
  misc_feature (21)..(21): 3'-3 attached inverted deoxyabasic moiety.
guguaaugacgguaucauutt

SEQ ID NO: 623 - DNA, 21 bp, Artificial Sequence
  Synthetic
  misc_feature (1)..(1): 5'-3 attached inverted deoxyabasic moiety.
  misc_feature (1)..(2): 2'-O-methyl
  misc_feature (3)..(3): 2'-deoxy-2'-fluoro
  misc_feature (4)..(6): 2'-O-methyl
  misc_feature (7)..(8): 2'-deoxy-2'-fluoro
  misc_feature (9)..(11): 2'-O-methyl
  misc_feature (12)..(13): 2'-deoxy-2'-fluoro
  misc_feature (14)..(14): 2'-O-methyl
  misc_feature (15)..(18): 2'-deoxy-2'-fluoro
  misc_feature (19)..(19): 2'-O-methyl
  misc_feature (21)..(21): 3'-3 attached inverted deoxyabasic moiety.
gauagacuggguuguuucatt

SEQ ID NO: 624 - DNA, 21 bp, Artificial Sequence
  Synthetic
  misc_feature (1)..(1): 5'-3 attached inverted deoxyabasic moiety.
  misc_feature (1)..(2): 2'-O-methyl
  misc_feature (3)..(3): 2'-deoxy-2'-fluoro
  misc_feature (4)..(4): 2'-O-methyl
  misc_feature (5)..(5): 2'-deoxy-2'-fluoro
  misc_feature (6)..(6): 2'-O-methyl
  misc_feature (7)..(8): 2'-deoxy-2'-fluoro
  misc_feature (9)..(10): 2'-O-methyl
  misc_feature (11)..(13): 2'-deoxy-2'-fluoro
  misc_feature (14)..(15): 2'-O-methyl
  misc_feature (16)..(16): 2'-deoxy-2'-fluoro
  misc_feature (17)..(17): 2'-O-methyl
  misc_feature (18)..(19): 2'-deoxy-2'-fluoro
  misc_feature (21)..(21): 3'-3 attached inverted deoxyabasic moiety.
gauguaucaaccuagugcutt

SEQ ID NO: 625 - DNA, 21 bp, Artificial Sequence
  Synthetic
  misc_feature (1)..(1): 5'-3 attached inverted deoxyabasic moiety.
  misc_feature (1)..(1): 2'-deoxy-2'-fluoro
  misc_feature (2)..(3): 2'-O-methyl
  misc_feature (4)..(4): 2'-deoxy-2'-fluoro
  misc_feature (5)..(5): 2'-O-methyl
  misc_feature (6)..(6): 2'-deoxy-2'-fluoro
  misc_feature (7)..(8): 2'-O-methyl
  misc_feature (9)..(9): 2'-deoxy-2'-fluoro
  misc_feature (10)..(10): 2'-O-methyl
  misc_feature (11)..(11): 2'-deoxy-2'-fluoro
  misc_feature (12)..(14): 2'-O-methyl
  misc_feature (15)..(17): 2'-deoxy-2'-fluoro
  misc_feature (18)..(18): 2'-O-methyl
  misc_feature (19)..(19): 2'-deoxy-2'-fluoro
  misc_feature (21)..(21): 5'-3 attached inverted deoxyabasic moiety.
caguguggugcagacucautt

SEQ ID NO: 626 - DNA, 21 bp, Artificial Sequence
  Synthetic
  misc_feature (1)..(1): 5'-3 attached inverted deoxyabasic moiety.
  misc_feature (1)..(1): 2'-deoxy-2'-fluoro
  misc_feature (2)..(4): 2'-O-methyl
  misc_feature (5)..(6): 2'-deoxy-2'-fluoro
  misc_feature (7)..(7): 2'-O-methyl
  misc_feature (8)..(8): 2'-deoxy-2'-fluoro
  misc_feature (9)..(9): 2'-O-methyl
  misc_feature (10)..(10): 2'-deoxy-2'-fluoro
  misc_feature (11)..(12): 2'-O-methyl
  misc_feature (13)..(13): 2'-deoxy-2'-fluoro
  misc_feature (14)..(15): 2'-O-methyl
  misc_feature (16)..(16): 2'-deoxy-2'-fluoro
  misc_feature (17)..(18): 2'-O-methyl
  misc_feature (19)..(19): 2'-deoxy-2'-fluoro
  misc_feature (21)..(21): 3'-3 attached inverted deoxyabasic moiety.
cagaucguguaaugacggutt

SEQ ID NO: 627 - DNA, 21 bp, Artificial Sequence
  Synthetic
  misc_feature (1)..(3): 2'-O-methyl
  misc_feature (4)..(13): 2'-deoxy-2'-fluoro
  misc_feature (14)..(14): 2'-O-methyl
  misc_feature (15)..(16): 2'-deoxy-2'-fluoro
  misc_feature (17)..(17): 2'-O-methyl
  misc_feature (18)..(19): 2'-deoxy-2'-fluoro
  misc_feature (20)..(21): phosphorothioate linkage
agacuuuuuuuuugccgcctt

SEQ ID NO: 628 - DNA, 21 bp, Artificial Sequence
  Synthetic
  misc_feature (1)..(2): 2'-O-methyl
  misc_feature (3)..(4): 2'-deoxy-2'-fluoro
  misc_feature (5)..(7): 2'-O-methyl
  misc_feature (8)..(9): 2'-deoxy-2'-fluoro
  misc_feature (10)..(10): 2'-O-methyl
  misc_feature (11)..(12): 2'-deoxy-2'-fluoro
  misc_feature (13)..(14): 2'-O-methyl
  misc_feature (15)..(16): 2'-deoxy-2'-fluoro
  misc_feature (17)..(19): 2'-O-methyl
  misc_feature (20)..(21): phosphorothioate linkage
aacugaaccgccaguugagtt

SEQ ID NO: 629 - DNA, 21 bp, Artificial Sequence
  Synthetic
  misc_feature (1)..(1): 2'-O-methyl
  misc_feature (2)..(2): 2'-deoxy-2'-fluoro
  misc_feature (3)..(4): 2'-O-methyl
  misc_feature (5)..(5): 2'-deoxy-2'-fluoro
  misc_feature (6)..(6): 2'-O-methyl
  misc_feature (7)..(8): 2'-deoxy-2'-fluoro
  misc_feature (9)..(9): 2'-O-methyl
  misc_feature (10)..(11): 2'-deoxy-2'-fluoro
  misc_feature (12)..(12): 2'-O-methyl
  misc_feature (13)..(14): 2'-deoxy-2'-fluoro
  misc_feature (15)..(15): 2'-O-methyl
  misc_feature (16)..(16): 2'-deoxy-2'-fluoro
  misc_feature (17)..(17): 2'-O-methyl
  misc_feature (18)..(18): 2'-deoxy-2'-fluoro
  misc_feature (19)..(19): 2'-O-methyl
  misc_feature (20)..(21): phosphorothioate linkage
augauaccgucauuacacgtt

SEQ ID NO: 630 - DNA, 21 bp, Artificial Sequence
  Synthetic
  misc_feature (1)..(2): 2'-O-methyl
  misc_feature (3)..(3): 2'-deoxy-2'-fluoro
  misc_feature (4)..(5): 2'-O-methyl
  misc_feature (6)..(6): 2'-deoxy-2'-fluoro
  misc_feature (7)..(7): 2'-O-methyl
  misc_feature (8)..(9): 2'-deoxy-2'-fluoro
  misc_feature (10)..(10): 2'-O-methyl
  misc_feature (11)..(12): 2'-deoxy-2'-fluoro
  misc_feature (13)..(13): 2'-O-methyl
  misc_feature (14)..(15): 2'-deoxy-2'-fluoro
  misc_feature (16)..(16): 2'-O-methyl
  misc_feature (17)..(17): 2'-deoxy-2'-fluoro
  misc_feature (18)..(18): 2'-O-methyl
  misc_feature (19)..(19): 2'-deoxy-2'-fluoro
  misc_feature (20)..(21): phosphorothioate linkage
aaugauaccgucauuacactt

SEQ ID NO: 631 - DNA, 21 bp, Artificial Sequence
  Synthetic
  misc_feature (1)..(1): 2'-deoxy-2'-fluoro
  misc_feature (2)..(5): 2'-O-methyl
  misc_feature (6)..(6): 2'-deoxy-2'-fluoro
  misc_feature (7)..(8): 2'-O-methyl
  misc_feature (9)..(11): 2'-deoxy-2'-fluoro
  misc_feature (12)..(13): 2'-O-methyl
  misc_feature (14)..(16): 2'-deoxy-2'-fluoro
  misc_feature (17)..(17): 2'-O-methyl
  misc_feature (18)..(19): 2'-deoxy-2'-fluoro
  misc_feature (20)..(21): phosphorothioate linkage
ugaaacaacccagucuauctt

SEQ ID NO: 632 - DNA, 21 bp, Artificial Sequence
  Synthetic
  misc_feature (1)..(2): 2'-O-methyl
  misc_feature (3)..(3): 2'-deoxy-2'-fluoro
  misc_feature (4)..(4): 2'-O-methyl
  misc_feature (5)..(6): 2'-deoxy-2'-fluoro
  misc_feature (7)..(9): 2'-O-methyl
  misc_feature (10)..(11): 2'-deoxy-2'-fluoro
  misc_feature (12)..(13): 2'-O-methyl
  misc_feature (14)..(14): 2'-deoxy-2'-fluoro
  misc_feature (15)..(15): 2'-O-methyl
  misc_feature (16)..(16): 2'-deoxy-2'-fluoro
  misc_feature (17)..(17): 2'-O-methyl
  misc_feature (18)..(19): 2'-deoxy-2'-fluoro
  misc_feature (20)..(21): phosphorothioate linkage
agcacuagguugauacauctt

SEQ ID NO: 633 - DNA, 21 bp, Artificial Sequence
  Synthetic
  misc_feature (1)..(1): 2'-O-methyl
  misc_feature (2)..(2): 2'-deoxy-2'-fluoro
  misc_feature (3)..(5): 2'-O-methyl
  misc_feature (6)..(8): 2'-deoxy-2'-fluoro
  misc_feature (9)..(9): 2'-O-methyl
  misc_feature (10)..(10): 2'-deoxy-2'-fluoro
  misc_feature (11)..(11): 2'-O-methyl
  misc_feature (12)..(13): 2'-deoxy-2'-fluoro
  misc_feature (14)..(14): 2'-O-methyl
  misc_feature (15)..(15): 2'-deoxy-2'-fluoro
  misc_feature (16)..(16): 2'-O-methyl
  misc_feature (17)..(18): 2'-deoxy-2'-fluoro
  misc_feature (19)..(19): 2'-O-methyl
  misc_feature (20)..(21): phosphorothioate linkage
augagucugcaccacacugtt

SEQ ID NO: 634 - DNA, 21 bp, Artificial Sequence
  Synthetic
  misc_feature (1)..(1): 2'-O-methyl
  misc_feature (2)..(3): 2'-deoxy-2'-fluoro
  misc_feature (4)..(4): 2'-O-methyl
  misc_feature (5)..(6): 2'-deoxy-2'-fluoro
  misc_feature (7)..(7): 2'-O-methyl
  misc_feature (8)..(9): 2'-deoxy-2'-fluoro
  misc_feature (10)..(10): 2'-O-methyl
  misc_feature (11)..(11): 2'-deoxy-2'-fluoro
  misc_feature (12)..(12): 2'-O-methyl
  misc_feature (13)..(13): 2'-deoxy-2'-fluoro
  misc_feature (14)..(15): 2'-O-methyl
  misc_feature (16)..(18): 2'-deoxy-2'-fluoro
  misc_feature (19)..(19): 2'-O-methyl
  misc_feature (20)..(21): phosphorothioate linkage
accgucauuacacgaucugtt

SEQ ID NO: 635 - DNA, 21 bp, Artificial Sequence
  Synthetic
  misc_feature (1)..(1): 5'-3 attached inverted deoxyabasic moiety.
  misc_feature (21)..(21): 3'-3 attached inverted deoxyabasic moiety.
ggcggcaaaaaaaaagucutt

SEQ ID NO: 636 - DNA, 21 bp, Artificial Sequence
  Synthetic
  misc_feature (1)..(1): 5'-3 attached inverted deoxyabasic moiety.
  misc_feature (21)..(21): 3'-3 attached inverted deoxyabasic moiety.
cucaacuggcgguucaguutt

SEQ ID NO: 637 - DNA, 21 bp, Artificial Sequence
  Synthetic
  misc_feature (1)..(1): 5'-3 attached inverted deoxyabasic moiety.
  misc_feature (21)..(21): 3'-3 attached inverted deoxyabasic moiety.
cguguaaugacgguaucautt

SEQ ID NO: 638 - DNA, 21 bp, Artificial Sequence
  Synthetic
  misc_feature (1)..(1): 5'-3 attached inverted deoxyabasic moiety.
  misc_feature (21)..(21): 3'-3 attached inverted deoxyabasic moiety.
guguaaugacgguaucauutt

SEQ ID NO: 639 - DNA, 21 bp, Artificial Sequence
  Synthetic
  misc_feature (1)..(1): 5'-3 attached inverted deoxyabasic moiety.
  misc_feature (21)..(21): 3'-3 attached inverted deoxyabasic moiety.
gauagacuggguuguuucatt

SEQ ID NO: 640 - DNA, 21 bp, Artificial Sequence
  Synthetic
  misc_feature (1)..(1): 5'-3 attached inverted deoxyabasic moiety.
  misc_feature (21)..(21): 3'-3 attached inverted deoxyabasic moiety.
gauguaucaaccuagugcutt

SEQ ID NO: 641 - DNA, 21 bp, Artificial Sequence
  Synthetic
  misc_feature (1)..(1): 5'-3 attached inverted deoxyabasic moiety.
  misc_feature (21)..(21): 3'-3 attached inverted deoxyabasic moiety.
caguguggugcagacucautt

SEQ ID NO: 642 - DNA, 21 bp, Artificial Sequence
  Synthetic
  misc_feature (1)..(1): 5'-3 attached inverted deoxyabasic moiety.
  misc_feature (21)..(21): 3'-3 attached inverted deoxyabasic moiety.
cagaucguguaaugacggutt

SEQ ID NO: 643 - DNA, 21 bp, Artificial Sequence
  Synthetic
  misc_feature (20)..(21): phosphorothioate linkage
agacuuuuuuuuugccgcctt

SEQ ID NO: 644 - DNA, 21 bp, Artificial Sequence
  Synthetic
  misc_feature (20)..(21): phosphorothioate linkage
aacugaaccgccaguugagtt

SEQ ID NO: 645 - DNA, 21 bp, Artificial Sequence
  Synthetic
  misc_feature (20)..(21): phosphorothioate linkage
augauaccgucauuacacgtt

SEQ ID NO: 646 - DNA, 21 bp, Artificial Sequence
  Synthetic
  misc_feature (20)..(21): phosphorothioate linkage
aaugauaccgucauuacactt

SEQ ID NO: 647 - DNA, 21 bp, Artificial Sequence
  Synthetic
  misc_feature (20)..(21): phosphorothioate linkage
ugaaacaacccagucuauctt

SEQ ID NO: 648 - DNA, 21 bp, Artificial Sequence
  Synthetic
  misc_feature (20)..(21): phosphorothioate linkage
agcacuagguugauacauctt

SEQ ID NO: 649 - DNA, 21 bp, Artificial Sequence
  Synthetic
  misc_feature (20)..(21): phosphorothioate linkage
augagucugcaccacacugtt

SEQ ID NO: 650 - DNA, 21 bp, Artificial Sequence
  Synthetic
  misc_feature (20)..(21): phosphorothioate linkage
accgucauuacacgaucugtt

SEQ ID NO: 651 - DNA, 21 bp, Artificial Sequence
  Synthetic
  misc_feature (1)..(3): 2'-O-methyl
  misc_feature (4)..(13): 2'-deoxy-2'-fluoro
  misc_feature (14)..(14): 2'-O-methyl
  misc_feature (15)..(16): 2'-deoxy-2'-fluoro
  misc_feature (17)..(17): 2'-O-methyl
  misc_feature (18)..(19): 2'-deoxy-2'-fluoro
  misc_feature (21)..(21): 3'-3 attached inverted deoxyabasic moiety.
agacuuuuuuuuugccgcctt

SEQ ID NO: 652 - DNA, 21 bp, Artificial Sequence
  Synthetic
  misc_feature (1)..(2): 2'-O-methyl
  misc_feature (3)..(4): 2'-deoxy-2'-fluoro
  misc_feature (5)..(7): 2'-O-methyl
  misc_feature (8)..(9): 2'-deoxy-2'-fluoro
  misc_feature (10)..(10): 2'-O-methyl
  misc_feature (11)..(12): 2'-deoxy-2'-fluoro
  misc_feature (13)..(14): 2'-O-methyl
  misc_feature (15)..(16): 2'-deoxy-2'-fluoro
  misc_feature (17)..(19): 2'-O-methyl
  misc_feature (21)..(21): 3'-3 attached inverted deoxyabasic moiety.
aacugaaccgccaguugagtt

SEQ ID NO: 653 - DNA, 21 bp, Artificial Sequence
  Synthetic
  misc_feature (1)..(1): 2'-O-methyl
  misc_feature (2)..(2): 2'-deoxy-2'-fluoro
  misc_feature (3)..(4): 2'-O-methyl
  misc_feature (5)..(5): 2'-deoxy-2'-fluoro
  misc_feature (6)..(6): 2'-O-methyl
  misc_feature (7)..(8): 2'-deoxy-2'-fluoro
  misc_feature (9)..(9): 2'-O-methyl
  misc_feature (10)..(11): 2'-deoxy-2'-fluoro
  misc_feature (12)..(12): 2'-O-methyl
  misc_feature (13)..(14): 2'-deoxy-2'-fluoro
  misc_feature (15)..(15): 2'-O-methyl
  misc_feature (16)..(16): 2'-deoxy-2'-fluoro
  misc_feature (17)..(17): 2'-O-methyl
  misc_feature (18)..(18): 2'-deoxy-2'-fluoro
  misc_feature (19)..(19): 2'-O-methyl
  misc_feature (21)..(21): 3'-3 attached inverted deoxyabasic moiety.
augauaccgucauuacacgtt

SEQ ID NO: 654 - DNA, 21 bp, Artificial Sequence
  Synthetic
  misc_feature (1)..(2): 2'-O-methyl
  misc_feature (3)..(3): 2'-deoxy-2'-fluoro
  misc_feature (4)..(5): 2'-O-methyl
  misc_feature (6)..(6): 2'-deoxy-2'-fluoro
  misc_feature (7)..(7): 2'-O-methyl
  misc_feature (8)..(9): 2'-deoxy-2'-fluoro
  misc_feature (10)..(10): 2'-O-methyl
  misc_feature (11)..(12): 2'-deoxy-2'-fluoro
  misc_feature (13)..(13): 2'-O-methyl
  misc_feature (14)..(15): 2'-deoxy-2'-fluoro
  misc_feature (16)..(16): 2'-O-methyl
  misc_feature (17)..(17): 2'-deoxy-2'-fluoro
  misc_feature (18)..(18): 2'-O-methyl
  misc_feature (19)..(19): 2'-deoxy-2'-fluoro
  misc_feature (21)..(21): 3'-3 attached inverted deoxyabasic moiety.
aaugauaccgucauuacactt

SEQ ID NO: 655 - DNA, 21 bp, Artificial Sequence
  Synthetic
  misc_feature (1)..(1): 2'-deoxy-2'-fluoro
  misc_feature (2)..(5): 2'-O-methyl
  misc_feature (6)..(6): 2'-deoxy-2'-fluoro
  misc_feature (7)..(8): 2'-O-methyl
  misc_feature (9)..(11): 2'-deoxy-2'-fluoro
  misc_feature (12)..(13): 2'-O-methyl
  misc_feature (14)..(16): 2'-deoxy-2'-fluoro
  misc_feature (17)..(17): 2'-O-methyl
  misc_feature (18)..(19): 2'-deoxy-2'-fluoro
  misc_feature (21)..(21): 3'-3 attached inverted deoxyabasic moiety.
ugaaacaacccagucuauctt

SEQ ID NO: 656 - DNA, 21 bp, Artificial Sequence
  Synthetic
  misc_feature (1)..(2): 2'-O-methyl
  misc_feature (3)..(3): 2'-deoxy-2'-fluoro
  misc_feature (4)..(4): 2'-O-methyl
  misc_feature (5)..(6): 2'-deoxy-2'-fluoro
  misc_feature (7)..(9): 2'-O-methyl
  misc_feature (9)..(10): 2'-deoxy-2'-fluoro
  misc_feature (12)..(13): 2'-O-methyl
  misc_feature (14)..(14): 2'-deoxy-2'-fluoro
  misc_feature (15)..(15): 2'-O-methyl
  misc_feature (16)..(16): 2'-deoxy-2'-fluoro
  misc_feature (17)..(17): 2'-O-methyl
  misc_feature (18)..(19): 2'-deoxy-2'-fluoro
  misc_feature (21)..(21): 3'-3 attached inverted deoxyabasic moiety.
agcacuagguugauacauctt

SEQ ID NO: 657 - DNA, 21 bp, Artificial Sequence
  Synthetic
  misc_feature (1)..(1): 2'-O-methyl
  misc_feature (2)..(2): 2'-deoxy-2'-fluoro
  misc_feature (3)..(5): 2'-O-methyl
  misc_feature (6)..(8): 2'-deoxy-2'-fluoro
  misc_feature (9)..(9): 2'-O-methyl
  misc_feature (10)..(10): 2'-deoxy-2'-fluoro
  misc_feature (11)..(11): 2'-O-methyl
  misc_feature (12)..(13): 2'-deoxy-2'-fluoro
  misc_feature (14)..(14): 2'-O-methyl
  misc_feature (15)..(15): 2'-deoxy-2'-fluoro
  misc_feature (16)..(16): 2'-O-methyl
  misc_feature (17)..(18): 2'-deoxy-2'-fluoro
  misc_feature (19)..(19): 2'-O-methyl
  misc_feature (21)..(21): 3'-3 attached inverted deoxyabasic moiety.
augagucugcaccacacugtt

SEQ ID NO: 658 - DNA, 21 bp, Artificial Sequence
  Synthetic
  misc_feature (1)..(1): 2'-O-methyl
  misc_feature (2)..(3): 2'-deoxy-2'-fluoro
  misc_feature (4)..(4): 2'-O-methyl
  misc_feature (5)..(6): 2'-deoxy-2'-fluoro
  misc_feature (7)..(7): 2'-O-methyl
  misc_feature (8)..(9): 2'-deoxy-2'-fluoro
  misc_feature (10)..(10): 2'-O-methyl
  misc_feature (11)..(11): 2'-deoxy-2'-fluoro
  misc_feature (12)..(12): 2'-O-methyl
  misc_feature (13)..(13): 2'-deoxy-2'-fluoro
  misc_feature (14)..(15): 2'-O-methyl
  misc_feature (16)..(18): 2'-deoxy-2'-fluoro
  misc_feature (19)..(19): 2'-O-methyl
  misc_feature (21)..(21): 3'-3 attached inverted deoxyabasic moiety.
accgucauuacacgaucugtt

SEQ ID NO: 659 - DNA, 21 bp, Artificial Sequence
  Synthetic
  misc_feature (21)..(21): 3'-3 attached inverted deoxyabasic moiety.
agacuuuuuuuuugccgcctt

SEQ ID NO: 660 - DNA, 21 bp, Artificial Sequence
  Synthetic
  misc_feature (21)..(21): 3'-3 attached inverted deoxyabasic moiety.
aacugaaccgccaguugagtt

SEQ ID NO: 661 - DNA, 21 bp, Artificial Sequence
  Synthetic
  misc_feature (21)..(21): 3'-3 attached inverted deoxyabasic moiety.
augauaccgucauuacacgtt

SEQ ID NO: 662 - DNA, 21 bp, Artificial Sequence
  Synthetic
  misc_feature (21)..(21): 3'-3 attached inverted deoxyabasic moiety.
aaugauaccgucauuacactt

SEQ ID NO: 663 - DNA, 21 bp, Artificial Sequence
  Synthetic
  misc_feature (21)..(21): 3'-3 attached inverted deoxyabasic moiety.
ugaaacaacccagucuauctt

SEQ ID NO: 664 - DNA, 21 bp, Artificial Sequence
  Synthetic
  misc_feature (21)..(21): 3'-3 attached inverted deoxyabasic moiety.
agcacuagguugauacauctt

SEQ ID NO: 665 - DNA, 21 bp, Artificial Sequence
  Synthetic
  misc_feature (21)..(21): 3'-3 attached inverted deoxyabasic moiety.
augagucugcaccacacugtt

SEQ ID NO: 666 - DNA, 21 bp, Artificial Sequence
  Synthetic
  misc_feature (21)..(21): 3'-3 attached inverted deoxyabasic moiety.
accgucauuacacgaucugtt

SEQ ID NO: 667 - DNA, 21 bp, Artificial Sequence
  Synthetic
  misc_feature (4)..(13): 2'-deoxy-2'-fluoro
  misc_feature (14)..(14): 2'-O-methyl
  misc_feature (15)..(16): 2'-deoxy-2'-fluoro
  misc_feature (17)..(17): 2'-O-methyl
  misc_feature (18)..(19): 2'-deoxy-2'-fluoro
  misc_feature (20)..(21): phosphorothioate linkage
agacuuuuuuuuugccgcctt

SEQ ID NO: 668 - DNA, 21 bp, Artificial Sequence
  Synthetic
  misc_feature (4)..(4): 2'-deoxy-2'-fluoro
  misc_feature (5)..(7): 2'-O-methyl
  misc_feature (8)..(9): 2'-deoxy-2'-fluoro
  misc_feature (10)..(10): 2'-O-methyl
  misc_feature (11)..(12): 2'-deoxy-2'-fluoro
  misc_feature (13)..(14): 2'-O-methyl
  misc_feature (15)..(16): 2'-deoxy-2'-fluoro
  misc_feature (17)..(19): 2'-O-methyl
  misc_feature (20)..(21): phosphorothioate linkage
aacugaaccgccaguugagtt

SEQ ID NO: 669 - DNA, 21 bp, Artificial Sequence
  Synthetic
  misc_feature (4)..(4): 2'-O-methyl
  misc_feature (5)..(5): 2'-deoxy-2'-fluoro
  misc_feature (6)..(6): 2'-O-methyl
  misc_feature (7)..(8): 2'-deoxy-2'-fluoro
  misc_feature (9)..(9): 2'-O-methyl
  misc_feature (10)..(11): 2'-deoxy-2'-fluoro
  misc_feature (12)..(12): 2'-O-methyl
  misc_feature (13)..(14): 2'-deoxy-2'-fluoro
  misc_feature (15)..(15): 2'-O-methyl
  misc_feature (16)..(16): 2'-deoxy-2'-fluoro
  misc_feature (17)..(17): 2'-O-methyl
  misc_feature (18)..(18): 2'-deoxy-2'-fluoro
  misc_feature (19)..(19): 2'-O-methyl
  misc_feature (20)..(21): phosphorothioate linkage
augauaccgucauuacacgtt

SEQ ID NO: 670 - DNA, 21 bp, Artificial Sequence
  Synthetic
  misc_feature (4)..(5): 2'-O-methyl
  misc_feature (6)..(6): 2'-deoxy-2'-fluoro
  misc_feature (7)..(7): 2'-O-methyl
  misc_feature (8)..(9): 2'-deoxy-2'-fluoro
  misc_feature (10)..(10): 2'-O-methyl
  misc_feature (11)..(12): 2'-deoxy-2'-fluoro
  misc_feature (13)..(13): 2'-O-methyl
  misc_feature (14)..(15): 2'-deoxy-2'-fluoro
  misc_feature (16)..(16): 2'-O-methyl
  misc_feature (17)..(17): 2'-deoxy-2'-fluoro
  misc_feature (18)..(18): 2'-O-methyl
  misc_feature (19)..(19): 2'-deoxy-2'-fluoro
  misc_feature (20)..(21): phosphorothioate linkage
aaugauaccgucauuacactt

SEQ ID NO: 671 - DNA, 21 bp, Artificial Sequence
  Synthetic
  misc_feature (4)..(5): 2'-O-methyl
  misc_feature (6)..(6): 2'-deoxy-2'-fluoro
  misc_feature (7)..(8): 2'-O-methyl
  misc_feature (9)..(11): 2'-deoxy-2'-fluoro
  misc_feature (12)..(13): 2'-O-methyl
  misc_feature (14)..(16): 2'-deoxy-2'-fluoro
  misc_feature (17)..(17): 2'-O-methyl
  misc_feature (18)..(19): 2'-deoxy-2'-fluoro
  misc_feature (20)..(21): phosphorothioate linkage
ugaaacaacccagucuauctt

SEQ ID NO: 672 - DNA, 21 bp, Artificial Sequence
  Synthetic
  misc_feature (4)..(4): 2'-O-methyl
  misc_feature (5)..(6): 2'-deoxy-2'-fluoro
  misc_feature (7)..(9): 2'-O-methyl
  misc_feature (9)..(10): 2'-deoxy-2'-fluoro
  misc_feature (12)..(13): 2'-O-methyl
  misc_feature (14)..(14): 2'-deoxy-2'-fluoro
  misc_feature (15)..(15): 2'-O-methyl
  misc_feature (16)..(16): 2'-deoxy-2'-fluoro
  misc_feature (17)..(17): 2'-O-methyl
  misc_feature (18)..(19): 2'-deoxy-2'-fluoro
  misc_feature (20)..(21): phosphorothioate linkage
agcacuagguugauacauctt

SEQ ID NO: 673 - DNA, 21 bp, Artificial Sequence
  Synthetic
  misc_feature (4)..(5): 2'-O-methyl
  misc_feature (6)..(8): 2'-deoxy-2'-fluoro
  misc_feature (9)..(9): 2'-O-methyl
  misc_feature (10)..(10): 2'-deoxy-2'-fluoro
  misc_feature (11)..(11): 2'-O-methyl
  misc_feature (12)..(13): 2'-deoxy-2'-fluoro
  misc_feature (14)..(14): 2'-O-methyl
  misc_feature (15)..(15): 2'-deoxy-2'-fluoro
  misc_feature (16)..(16): 2'-O-methyl
  misc_feature (17)..(18): 2'-deoxy-2'-fluoro
  misc_feature (19)..(19): 2'-O-methyl
  misc_feature (20)..(21): phosphorothioate linkage
augagucugcaccacacugtt

SEQ ID NO: 674 - DNA, 21 bp, Artificial Sequence
  Synthetic
  misc_feature (4)..(4): 2'-O-methyl
  misc_feature (5)..(6): 2'-deoxy-2'-fluoro
  misc_feature (7)..(7): 2'-O-methyl
  misc_feature (8)..(9): 2'-deoxy-2'-fluoro
  misc_feature (10)..(10): 2'-O-methyl
  misc_feature (11)..(11): 2'-deoxy-2'-fluoro
  misc_feature (12)..(12): 2'-O-methyl
  misc_feature (13)..(13): 2'-deoxy-2'-fluoro
  misc_feature (14)..(15): 2'-O-methyl
  misc_feature (16)..(18): 2'-deoxy-2'-fluoro
  misc_feature (19)..(19): 2'-O-methyl
  misc_feature (20)..(21): phosphorothioate linkage
accgucauuacacgaucugtt

SEQ ID NO: 675 - RNA, 19 nt, Artificial Sequence
  Synthetic
ggcggccgcgggcggcggg

SEQ ID NO: 676 - RNA, 19 nt, Artificial Sequence
  Synthetic
gcggcggaggugcggggcc

SEQ ID NO: 677 - RNA, 19 nt, Artificial Sequence
  Synthetic
cugcucccgccggcaccau

SEQ ID NO: 678 - RNA, 19 nt, Artificial Sequence
  Synthetic
uggccaagaccguggccua

SEQ ID NO: 679 - RNA, 19 nt, Artificial Sequence
  Synthetic
auuucuacgaccccgacgu

SEQ ID NO: 680 - RNA, 19 nt, Artificial Sequence
  Synthetic
ugggcaacuuccacuacgg

SEQ ID NO: 681 - RNA, 19 nt, Artificial Sequence
  Synthetic
gagcuggacacccuaugaa

SEQ ID NO: 682 - RNA, 19 nt, Artificial Sequence
  Synthetic
agccccaucgccuggcauu

SEQ ID NO: 683 - RNA, 19 nt, Artificial Sequence
  Synthetic
ugacccauagccugguccu

SEQ ID NO: 684 - RNA, 19 nt, Artificial Sequence
  Synthetic
ugcauuacggucucuauaa

SEQ ID NO: 685 - RNA, 19 nt, Artificial Sequence
  Synthetic
agaagaugaucgucuucaa

SEQ ID NO: 686 - RNA, 19 nt, Artificial Sequence
  Synthetic
agccauaccaggccuccca

SEQ ID NO: 687 - RNA, 19 nt, Artificial Sequence
  Synthetic
agcaugacaugugccgcuu

SEQ ID NO: 688 - RNA, 19 nt, Artificial Sequence
  Synthetic
uccacuccgaggacuacau

SEQ ID NO: 689 - RNA, 19 nt, Artificial Sequence
  Synthetic
uugacuuccugcagagagu

SEQ ID NO: 690 - RNA, 19 nt, Artificial Sequence
  Synthetic
ucagccccaccaauaugca

SEQ ID NO: 691 - RNA, 19 nt, Artificial Sequence
  Synthetic
aaggcuucaccaagagucu

SEQ ID NO: 692 - RNA, 19 nt, Artificial Sequence
  Synthetic
uuaaugccuucaacguagg

SEQ ID NO: 693 - RNA, 19 nt, Artificial Sequence
  Synthetic
gcgaugacugcccaguguu

SEQ ID NO: 694 - RNA, 19 nt, Artificial Sequence
  Synthetic
uucccgggcucuuugaguu

SEQ ID NO: 695 - RNA, 19 nt, Artificial Sequence
  Synthetic
ucugcucgcguuacacagg

SEQ ID NO: 696 - RNA, 19 nt, Artificial Sequence
  Synthetic
gcgcaucucugcaaggagc

SEQ ID NO: 697 - RNA, 19 nt, Artificial Sequence
  Synthetic
caacccagcugaacaacaa

SEQ ID NO: 698 - RNA, 19 nt, Artificial Sequence
  Synthetic
agaucugugauauugccau

SEQ ID NO: 699 - RNA, 19 nt, Artificial Sequence
  Synthetic
uuaacugggcugguggucu

SEQ ID NO: 700 - RNA, 19 nt, Artificial Sequence
  Synthetic
ugcaccaugccaagaaguu

SEQ ID NO: 701 - RNA, 19 nt, Artificial Sequence
  Synthetic
uugaggccucuggcuucug

SEQ ID NO: 702 - RNA, 19 nt, Artificial Sequence
  Synthetic
gcuaugucaacgacauugu

SEQ ID NO: 703 - RNA, 19 nt, Artificial Sequence
  Synthetic
ugauuggcauccuggagcu

SEQ ID NO: 704 - RNA, 19 nt, Artificial Sequence
  Synthetic
ugcucaaguaccacccucg

SEQ ID NO: 705 - RNA, 19 nt, Artificial Sequence
  Synthetic
gggugcucuacauugacau

SEQ ID NO: 706 - RNA, 19 nt, Artificial Sequence
  Synthetic
uugacauccaccaugguga

SEQ ID NO: 707 - RNA, 19 nt, Artificial Sequence
  Synthetic
acgggguucaagaagcuuu

SEQ ID NO: 708 - RNA, 19 nt, Artificial Sequence
  Synthetic
ucuaccucacugaccgggu

SEQ ID NO: 709 - RNA, 19 nt, Artificial Sequence
  Synthetic
ucaugacgguguccuucca

SEQ ID NO: 710 - RNA, 19 nt, Artificial Sequence
  Synthetic
acaaauacggaaauuacuu

SEQ ID NO: 711 - RNA, 19 nt, Artificial Sequence
  Synthetic
ucuucccuggcacagguga

SEQ ID NO: 712 - RNA, 19 nt, Artificial Sequence
  Synthetic
acauguaugaagucggggc

SEQ ID NO: 713 - RNA, 19 nt, Artificial Sequence
  Synthetic
cagagaguggccgcuacua

SEQ ID NO: 714 - RNA, 19 nt, Artificial Sequence
  Synthetic
acugucugaacgugccccu

SEQ ID NO: 715 - RNA, 19 nt, Artificial Sequence
  Synthetic
ugcgggauggcauugauga

SEQ ID NO: 716 - RNA, 19 nt, Artificial Sequence
  Synthetic
accagaguuacaagcaccu

SEQ ID NO: 717 - RNA, 19 nt, Artificial Sequence
  Synthetic
uuuuccagccgguuaucaa

SEQ ID NO: 718 - RNA, 19 nt, Artificial Sequence
  Synthetic
accagguaguggacuucua

SEQ ID NO: 719 - RNA, 19 nt, Artificial Sequence
  Synthetic
accaacccacgugcauugu

SEQ ID NO: 720 - RNA, 19 nt, Artificial Sequence
  Synthetic
ugcuccaguguggagcuga

SEQ ID NO: 721 - RNA, 19 nt, Artificial Sequence
  Synthetic
acucucugggcugugaucg

SEQ ID NO: 722 - RNA, 19 nt, Artificial Sequence
  Synthetic
gauugggcugcuuuaaccu

SEQ ID NO: 723 - RNA, 19 nt, Artificial Sequence
  Synthetic
ucagcauccgagggcaugg

SEQ ID NO: 724 - RNA, 19 nt, Artificial Sequence
  Synthetic
gggaaugcguugaauaugu

SEQ ID NO: 725 - RNA, 19 nt, Artificial Sequence
  Synthetic
ucaagagcuucaauauccc

SEQ ID NO: 726 - RNA, 19 nt, Artificial Sequence
  Synthetic
cucuacucgugcugggugg

SEQ ID NO: 727 - RNA, 19 nt, Artificial Sequence
  Synthetic
guggugguuauacuguccg

SEQ ID NO: 728 - RNA, 19 nt, Artificial Sequence
  Synthetic
gaaauguugcccgcugcug

SEQ ID NO: 729 - RNA, 19 nt, Artificial Sequence
  Synthetic
ggacauaugagacaucgcu

SEQ ID NO: 730 - RNA, 19 nt, Artificial Sequence
  Synthetic
ugcugguagaagaggccau

SEQ ID NO: 731 - RNA, 19 nt, Artificial Sequence
  Synthetic
uuagugaggagcuucccua

SEQ ID NO: 732 - RNA, 19 nt, Artificial Sequence
  Synthetic
auagugaauacuucgagua

SEQ ID NO: 733 - RNA, 19 nt, Artificial Sequence
  Synthetic
acuuugccccagacuucac

SEQ ID NO: 734 - RNA, 19 nt, Artificial Sequence
  Synthetic
cacuucauccagaugucag

SEQ ID NO: 735 - RNA, 19 nt, Artificial Sequence
  Synthetic
gcacccgcaucgagaauca

SEQ ID NO: 736 - RNA, 19 nt, Artificial Sequence
  Synthetic
agaacucacgccaguaucu

SEQ ID NO: 737 - RNA, 19 nt, Artificial Sequence
  Synthetic
uggaccagauccgccagac

SEQ ID NO: 738 - RNA, 19 nt, Artificial Sequence
  Synthetic
caaucuuugaaaaccugaa

SEQ ID NO: 739 - RNA, 19 nt, Artificial Sequence
  Synthetic
agaugcugaaccaugcacc

SEQ ID NO: 740 - RNA, 19 nt, Artificial Sequence
  Synthetic
cuaguguccagauucauga

SEQ ID NO: 741 - RNA, 19 nt, Artificial Sequence
  Synthetic
acgugccugcagaccuccu

SEQ ID NO: 742 - RNA, 19 nt, Artificial Sequence
  Synthetic
ugaccuaugacaggacuga

SEQ ID NO: 743 - RNA, 19 nt, Artificial Sequence
  Synthetic
augaggcugaugcagagga

SEQ ID NO: 744 - RNA, 19 nt, Artificial Sequence
  Synthetic
agagggguccugaggagaa

SEQ ID NO: 745 - RNA, 19 nt, Artificial Sequence
  Synthetic
acuauagcaggccagaggc

SEQ ID NO: 746 - RNA, 19 nt, Artificial Sequence
  Synthetic
cacccaaugaguucuauga

SEQ ID NO: 747 - RNA, 19 nt, Artificial Sequence
  Synthetic
auggagaccaugacaauga

SEQ ID NO: 748 - RNA, 19 nt, Artificial Sequence
  Synthetic
acaaggaaagcgaugugga

SEQ ID NO: 749 - RNA, 19 nt, Artificial Sequence
  Synthetic
agauuuaagaguggcuugg

SEQ ID NO: 750 - RNA, 19 nt, Artificial Sequence
  Synthetic
ggaugcugugucccaagga

SEQ ID NO: 751 - RNA, 19 nt, Artificial Sequence
  Synthetic
aauuucuuuucaccucuug

SEQ ID NO: 752 - RNA, 19 nt, Artificial Sequence
  Synthetic
gguugggcuggagggaaaa

SEQ ID NO: 753 - RNA, 19 nt, Artificial Sequence
  Synthetic
aggaguggcuccuagaguc

SEQ ID NO: 754 - RNA, 19 nt, Artificial Sequence
  Synthetic
ccugggggucaccccaggg

SEQ ID NO: 755 - RNA, 19 nt, Artificial Sequence
  Synthetic
gcuuuugcugacucuggga

SEQ ID NO: 756 - RNA, 19 nt, Artificial Sequence
  Synthetic
aaagagucuggagaccaca

SEQ ID NO: 757 - RNA, 19 nt, Artificial Sequence
  Synthetic
auuugguucucgaaccauc

SEQ ID NO: 758 - RNA, 19 nt, Artificial Sequence
  Synthetic
cuaccugcuuuuccucucu

SEQ ID NO: 759 - RNA, 19 nt, Artificial Sequence
  Synthetic
ucucccaaggccugacaau

SEQ ID NO: 760 - RNA, 19 nt, Artificial Sequence
  Synthetic
ugguaccuauuagggaugg

SEQ ID NO: 761 - RNA, 19 nt, Artificial Sequence
  Synthetic
gagauacagacaaggauag

SEQ ID NO: 762 - RNA, 19 nt, Artificial Sequence
  Synthetic
gcuaucugggacauuauug

SEQ ID NO: 763 - RNA, 19 nt, Artificial Sequence
  Synthetic
ggcagugggcccuggaggc

SEQ ID NO: 764 - RNA, 19 nt, Artificial Sequence
  Synthetic
ccagucccuagccccccuu

SEQ ID NO: 765 - RNA, 19 nt, Artificial Sequence
  Synthetic
ugccccuuauuucuucccu

SEQ ID NO: 766 - RNA, 19 nt, Artificial Sequence
  Synthetic
ugcuucccucgaacccaga

SEQ ID NO: 767 - RNA, 19 nt, Artificial Sequence
  Synthetic
agauuuuugagggaugaac

SEQ ID NO: 768 - RNA, 19 nt, Artificial Sequence
  Synthetic
cggguagacaaggacugag

SEQ ID NO: 769 - RNA, 19 nt, Artificial Sequence
  Synthetic
gauugccucugacuuccuc

SEQ ID NO: 770 - RNA, 19 nt, Artificial Sequence
  Synthetic
ccuccccuggguucugacu

SEQ ID NO: 771 - RNA, 19 nt, Artificial Sequence
  Synthetic
uucuuccuccccuugcuuc

SEQ ID NO: 772 - RNA, 19 nt, Artificial Sequence
  Synthetic
ccagggaagaugaagagag

SEQ ID NO: 773 - RNA, 19 nt, Artificial Sequence
  Synthetic
gagagauuuggaaggggcu

SEQ ID NO: 774 - RNA, 19 nt, Artificial Sequence
  Synthetic
ucuggcucccuaacaccug

SEQ ID NO: 775 - RNA, 19 nt, Artificial Sequence
  Synthetic
gaaucccagaugaugggaa

SEQ ID NO: 776 - RNA, 19 nt, Artificial Sequence
  Synthetic
aguauguuuucaagugugg

SEQ ID NO: 777 - RNA, 19 nt, Artificial Sequence
  Synthetic
gggaggauaugaaaauguu

SEQ ID NO: 778 - RNA, 19 nt, Artificial Sequence
  Synthetic
ucuguucucacuuuuggcu

SEQ ID NO: 779 - RNA, 19 nt, Artificial Sequence
  Synthetic
uuuauguccauuuuaccac

SEQ ID NO: 780 - RNA, 19 nt, Artificial Sequence
  Synthetic
cuguuuuuauccaauaaac

SEQ ID NO: 781 - RNA, 19 nt, Artificial Sequence
  Synthetic
cuaagucgguauuuuuugu

SEQ ID NO: 782 - RNA, 19 nt, Artificial Sequence
  Synthetic
uaccuuuaaaaaaaaaaaa

SEQ ID NO: 783 - RNA, 19 nt, Artificial Sequence
  Synthetic
cccgccgcccgcggccgcc

SEQ ID NO: 784 - RNA, 19 nt, Artificial Sequence
  Synthetic
ggccccgcaccuccgccgc

SEQ ID NO: 785 - RNA, 19 nt, Artificial Sequence
  Synthetic
auggugccggcgggagcag

SEQ ID NO: 786 - RNA, 19 nt, Artificial Sequence
  Synthetic
uaggccacggucuuggcca

SEQ ID NO: 787 - RNA, 19 nt, Artificial Sequence
  Synthetic
acgucggggucguagaaau

SEQ ID NO: 788 - RNA, 19 nt, Artificial Sequence
  Synthetic
ccguaguggaaguugccca

SEQ ID NO: 789 - RNA, 19 nt, Artificial Sequence
  Synthetic
uucauaggguguccagcuc

SEQ ID NO: 790 - RNA, 19 nt, Artificial Sequence
  Synthetic
aaugccaggcgauggggcu

SEQ ID NO: 791 - RNA, 19 nt, Artificial Sequence
  Synthetic
aggaccaggcuauggguca

SEQ ID NO: 792 - RNA, 19 nt, Artificial Sequence
  Synthetic
uuauagagaccguaaugca

SEQ ID NO: 793 - RNA, 19 nt, Artificial Sequence
  Synthetic
uugaagacgaucaucuucu

SEQ ID NO: 794 - RNA, 19 nt, Artificial Sequence
  Synthetic
ugggaggccugguauggcu

SEQ ID NO: 795 - RNA, 19 nt, Artificial Sequence
  Synthetic
aagcggcacaugucaugcu

SEQ ID NO: 796 - RNA, 19 nt, Artificial Sequence
  Synthetic
auguaguccucggagugga

SEQ ID NO: 797 - RNA, 19 nt, Artificial Sequence
  Synthetic
acucucugcaggaagucaa

SEQ ID NO: 798 - RNA, 19 nt, Artificial Sequence
  Synthetic
ugcauauugguggggcuga

SEQ ID NO: 799 - RNA, 19 nt, Artificial Sequence
  Synthetic
agacucuuggugaagccuu

SEQ ID NO: 800 - RNA, 19 nt, Artificial Sequence
  Synthetic
ccuacguugaaggcauuaa

SEQ ID NO: 801 - RNA, 19 nt, Artificial Sequence
  Synthetic
aacacugggcagucaucgc

SEQ ID NO: 802 - RNA, 19 nt, Artificial Sequence
  Synthetic
aacucaaagagcccgggaa

SEQ ID NO: 803 - RNA, 19 nt, Artificial Sequence
  Synthetic
ccuguguaacgcgagcaga

SEQ ID NO: 804 - RNA, 19 nt, Artificial Sequence
  Synthetic
gcuccuugcagagaugcgc

SEQ ID NO: 805 - RNA, 19 nt, Artificial Sequence
  Synthetic
uuguuguucagcuggguug

SEQ ID NO: 806 - RNA, 19 nt, Artificial Sequence
  Synthetic
auggcaauaucacagaucu

SEQ ID NO: 807 - RNA, 19 nt, Artificial Sequence
  Synthetic
agaccaccagcccaguuaa

SEQ ID NO: 808 - RNA, 19 nt, Artificial Sequence
  Synthetic
aacuucuuggcauggugca

SEQ ID NO: 809 - RNA, 19 nt, Artificial Sequence
  Synthetic
cagaagccagaggccucaa

SEQ ID NO: 810 - RNA, 19 nt, Artificial Sequence
  Synthetic
acaaugucguugacauagc

SEQ ID NO: 811 - RNA, 19 nt, Artificial Sequence
  Synthetic
agcuccaggaugccaauca

SEQ ID NO: 812 - RNA, 19 nt, Artificial Sequence
  Synthetic
cgagggugguacuugagca

SEQ ID NO: 813 - RNA, 19 nt, Artificial Sequence
  Synthetic
augucaauguagagcaccc

SEQ ID NO: 814 - RNA, 19 nt, Artificial Sequence
  Synthetic
ucaccaugguggaugucaa

SEQ ID NO: 815 - RNA, 19 nt, Artificial Sequence
  Synthetic
aaagcuucuugaaccccgu

SEQ ID NO: 816 - RNA, 19 nt, Artificial Sequence
  Synthetic
acccggucagugagguaga

SEQ ID NO: 817 - RNA, 19 nt, Artificial Sequence
  Synthetic
uggaaggacaccgucauga

SEQ ID NO: 818 - RNA, 19 nt, Artificial Sequence
  Synthetic
aaguaauuuccguauuugu

SEQ ID NO: 819 - RNA, 19 nt, Artificial Sequence
  Synthetic
ucaccugugccagggaaga

SEQ ID NO: 820 - RNA, 19 nt, Artificial Sequence
  Synthetic
gccccgacuucauacaugu

SEQ ID NO: 821 - RNA, 19 nt, Artificial Sequence
  Synthetic
uaguagcggccacucucug

SEQ ID NO: 822 - RNA, 19 nt, Artificial Sequence
  Synthetic
aggggcacguucagacagu

SEQ ID NO: 823 - RNA, 19 nt, Artificial Sequence
  Synthetic
ucaucaaugccaucccgca

SEQ ID NO: 824 - RNA, 19 nt, Artificial Sequence
  Synthetic
aggugcuuguaacucuggu

SEQ ID NO: 825 - RNA, 19 nt, Artificial Sequence
  Synthetic
uugauaaccggcuggaaaa

SEQ ID NO: 826 - RNA, 19 nt, Artificial Sequence
  Synthetic
uagaaguccacuaccuggu

SEQ ID NO: 827 - RNA, 19 nt, Artificial Sequence
  Synthetic
acaaugcacguggguuggu

SEQ ID NO: 828 - RNA, 19 nt, Artificial Sequence
  Synthetic
ucagcuccacacuggagca

SEQ ID NO: 829 - RNA, 19 nt, Artificial Sequence
  Synthetic
cgaucacagcccagagagu

SEQ ID NO: 830 - RNA, 19 nt, Artificial Sequence
  Synthetic
agguuaaagcagcccaauc

SEQ ID NO: 831 - RNA, 19 nt, Artificial Sequence
  Synthetic
ccaugcccucggaugcuga

SEQ ID NO: 832 - RNA, 19 nt, Artificial Sequence
  Synthetic
acauauucaacgcauuccc

SEQ ID NO: 833 - RNA, 19 nt, Artificial Sequence
  Synthetic
gggauauugaagcucuuga

SEQ ID NO: 834 - RNA, 19 nt, Artificial Sequence
  Synthetic
ccacccagcacgaguagag

SEQ ID NO: 835 - RNA, 19 nt, Artificial Sequence
  Synthetic
cggacaguauaaccaccac

SEQ ID NO: 836 - RNA, 19 nt, Artificial Sequence
  Synthetic
cagcagcgggcaacauuuc

SEQ ID NO: 837 - RNA, 19 nt, Artificial Sequence
  Synthetic
agcgaugucucauaugucc

SEQ ID NO: 838 - RNA, 19 nt, Artificial Sequence
  Synthetic
auggccucuucuaccagca

SEQ ID NO: 839 - RNA, 19 nt, Artificial Sequence
  Synthetic
uagggaagcuccucacuaa

SEQ ID NO: 840 - RNA, 19 nt, Artificial Sequence
  Synthetic
uacucgaaguauucacuau

SEQ ID NO: 841 - RNA, 19 nt, Artificial Sequence
  Synthetic
gugaagucuggggcaaagu

SEQ ID NO: 842 - RNA, 19 nt, Artificial Sequence
  Synthetic
cugacaucuggaugaagug

SEQ ID NO: 843 - RNA, 19 nt, Artificial Sequence
  Synthetic
ugauucucgaugcgggugc

SEQ ID NO: 844 - RNA, 19 nt, Artificial Sequence
  Synthetic
agauacuggcgugaguucu

SEQ ID NO: 845 - RNA, 19 nt, Artificial Sequence
  Synthetic
gucuggcggaucuggucca

SEQ ID NO: 846 - RNA, 19 nt, Artificial Sequence
  Synthetic
uucagguuuucaaagauug

SEQ ID NO: 847 - RNA, 19 nt, Artificial Sequence
  Synthetic
ggugcaugguucagcaucu

SEQ ID NO: 848 - RNA, 19 nt, Artificial Sequence
  Synthetic
ucaugaaucuggacacuag

SEQ ID NO: 849 - RNA, 19 nt, Artificial Sequence
  Synthetic
aggaggucugcaggcacgu

SEQ ID NO: 850 - RNA, 19 nt, Artificial Sequence
  Synthetic
ucaguccugucauagguca

SEQ ID NO: 851 - RNA, 19 nt, Artificial Sequence
  Synthetic
uccucugcaucagccucau

SEQ ID NO: 852 - RNA, 19 nt, Artificial Sequence
  Synthetic
uucuccucaggaccccucu

SEQ ID NO: 853 - RNA, 19 nt, Artificial Sequence
  Synthetic
gccucuggccugcuauagu

SEQ ID NO: 854 - RNA, 19 nt, Artificial Sequence
  Synthetic
ucauagaacucauugggug

SEQ ID NO: 855 - RNA, 19 nt, Artificial Sequence
  Synthetic
ucauugucauggucuccau

SEQ ID NO: 856 - RNA, 19 nt, Artificial Sequence
  Synthetic
uccacaucgcuuuccuugu

SEQ ID NO: 857 - RNA, 19 nt, Artificial Sequence
  Synthetic
ccaagccacucuuaaaucu

SEQ ID NO: 858 - RNA, 19 nt, Artificial Sequence
  Synthetic
uccuugggacacagcaucc

SEQ ID NO: 859 - RNA, 19 nt, Artificial Sequence
  Synthetic
caagaggugaaaagaaauu

SEQ ID NO: 860 - RNA, 19 nt, Artificial Sequence
  Synthetic
uuuucccuccagcccaacc

SEQ ID NO: 861 - RNA, 19 nt, Artificial Sequence
  Synthetic
gacucuaggagccacuccu

SEQ ID NO: 862 - RNA, 19 nt, Artificial Sequence
  Synthetic
cccuggggugacccccagg

SEQ ID NO: 863 - RNA, 19 nt, Artificial Sequence
  Synthetic
ucccagagucagcaaaagc

SEQ ID NO: 864 - RNA, 19 nt, Artificial Sequence
  Synthetic
uguggucuccagacucuuu

SEQ ID NO: 865 - RNA, 19 nt, Artificial Sequence
  Synthetic
gaugguucgagaaccaaau

SEQ ID NO: 866 - RNA, 19 nt, Artificial Sequence
  Synthetic
agagaggaaaagcagguag

SEQ ID NO: 867 - RNA, 19 nt, Artificial Sequence
  Synthetic
auugucaggccuugggaga

SEQ ID NO: 868 - RNA, 19 nt, Artificial Sequence
  Synthetic
ccaucccuaauagguacca

SEQ ID NO: 869 - RNA, 19 nt, Artificial Sequence
  Synthetic
cuauccuugucuguaucuc

SEQ ID NO: 870 - RNA, 19 nt, Artificial Sequence
  Synthetic
caauaaugucccagauagc

SEQ ID NO: 871 - RNA, 19 nt, Artificial Sequence
  Synthetic
gccuccagggcccacugcc

SEQ ID NO: 872 - RNA, 19 nt, Artificial Sequence
  Synthetic
aaggggggcuagggacugg

SEQ ID NO: 873 - RNA, 19 nt, Artificial Sequence
  Synthetic
agggaagaaauaaggggca

SEQ ID NO: 874 - RNA, 19 nt, Artificial Sequence
  Synthetic
ucuggguucgagggaagca

SEQ ID NO: 875 - RNA, 19 nt, Artificial Sequence
  Synthetic
guucaucccucaaaaaucu

SEQ ID NO: 876 - RNA, 19 nt, Artificial Sequence
  Synthetic
cucaguccuugucuacccg

SEQ ID NO: 877 - RNA, 19 nt, Artificial Sequence
  Synthetic
gaggaagucagaggcaauc

SEQ ID NO: 878 - RNA, 19 nt, Artificial Sequence
  Synthetic
agucagaacccaggggagg

SEQ ID NO: 879 - RNA, 19 nt, Artificial Sequence
  Synthetic
gaagcaaggggaggaagaa

SEQ ID NO: 880 - RNA, 19 nt, Artificial Sequence
  Synthetic
cucucuucaucuucccugg

SEQ ID NO: 881 - RNA, 19 nt, Artificial Sequence
  Synthetic
agccccuuccaaaucucuc

SEQ ID NO: 882 - RNA, 19 nt, Artificial Sequence
  Synthetic
cagguguuagggagccaga

SEQ ID NO: 883 - RNA, 19 nt, Artificial Sequence
  Synthetic
uucccaucaucugggauuc

SEQ ID NO: 884 - RNA, 19 nt, Artificial Sequence
  Synthetic
ccacacuugaaaacauacu

SEQ ID NO: 885 - RNA, 19 nt, Artificial Sequence
  Synthetic
aacauuuucauauccuccc

SEQ ID NO: 886 - RNA, 19 nt, Artificial Sequence
  Synthetic
agccaaaagugagaacaga

SEQ ID NO: 887 - RNA, 19 nt, Artificial Sequence
  Synthetic
gugguaaaauggacauaaa

SEQ ID NO: 888 - RNA, 19 nt, Artificial Sequence
  Synthetic
guuuauuggauaaaaacag

SEQ ID NO: 889 - RNA, 19 nt, Artificial Sequence
  Synthetic
acaaaaaauaccgacuuag

SEQ ID NO: 890 - RNA, 19 nt, Artificial Sequence
  Synthetic
uuuuuuuuuuuuaaaggua

SEQ ID NO: 891 - RNA, 23 nt, Artificial Sequence
  Synthetic
gaguucugcucgcguuacacagg

SEQ ID NO: 892 - RNA, 23 nt, Artificial Sequence
  Synthetic
ucgauugggcugcuuuaaccuca

SEQ ID NO: 893 - RNA, 23 nt, Artificial Sequence
  Synthetic
gccgguuaucaaccagguagugg

SEQ ID NO: 894 - RNA, 23 nt, Artificial Sequence
  Synthetic
cagguaguggacuucuaccaacc

SEQ ID NO: 895 - RNA, 23 nt, Artificial Sequence
  Synthetic
ugguucucgaaccaucuaccugc

SEQ ID NO: 896 - RNA, 23 nt, Artificial Sequence
  Synthetic
uaccuauuagggauggagauaca

SEQ ID NO: 897 - RNA, 23 nt, Artificial Sequence
  Synthetic
ugccuucaacguaggcgaugacu

SEQ ID NO: 898 - RNA, 23 nt, Artificial Sequence
  Synthetic
cucuuugaguucugcucgcguua

SEQ ID NO: 899 - DNA, 21 bp, Artificial Sequence
  Synthetic
guucugcucgcguuacacatt

SEQ ID NO: 900 - DNA, 21 bp, Artificial Sequence
  Synthetic
gauugggcugcuuuaaccutt

SEQ ID NO: 901 - DNA, 21 bp, Artificial Sequence
  Synthetic
cgguuaucaaccagguagutt

SEQ ID NO: 902 - DNA, 21 bp, Artificial Sequence
  Synthetic
gguaguggacuucuaccaatt

SEQ ID NO: 903 - DNA, 21 bp, Artificial Sequence
  Synthetic
guucucgaaccaucuaccutt

SEQ ID NO: 904 - DNA, 21 bp, Artificial Sequence
  Synthetic
ccuauuagggauggagauatt

SEQ ID NO: 905 - DNA, 21 bp, Artificial Sequence
  Synthetic
ccuucaacguaggcgaugatt

SEQ ID NO: 906 - DNA, 21 bp, Artificial Sequence
  Synthetic
cuuugaguucugcucgcgutt

SEQ ID NO: 907 - DNA, 21 bp, Artificial Sequence
  Synthetic
uguguaacgcgagcagaactt

SEQ ID NO: 908 - DNA, 21 bp, Artificial Sequence
  Synthetic
agguuaaagcagcccaauctt

SEQ ID NO: 909 - DNA, 21 bp, Artificial Sequence
  Synthetic
acuaccugguugauaaccgtt

SEQ ID NO: 910 - DNA, 21 bp, Artificial Sequence
  Synthetic
uugguagaaguccacuacctt

SEQ ID NO: 911 - DNA, 21 bp, Artificial Sequence
  Synthetic
agguagaugguucgagaactt

SEQ ID NO: 912 - DNA, 21 bp, Artificial Sequence
  Synthetic
uaucuccaucccuaauaggtt

SEQ ID NO: 913 - DNA, 21 bp, Artificial Sequence
  Synthetic
ucaucgccuacguugaaggtt

SEQ ID NO: 914 - DNA, 21 bp, Artificial Sequence
  Synthetic
acgcgagcagaacucaaagtt

SEQ ID NO: 915 - DNA, 21 bp, Artificial Sequence
  Synthetic
  misc_feature (1)..(1): 5'-3 attached inverted deoxyabasic moiety.
  misc_feature (2)..(5): 2'-deoxy-2'-fluoro
  misc_feature (7)..(9): 2'-deoxy-2'-fluoro
  misc_feature (11)..(11): 2'-deoxy-2'-fluoro
  misc_feature (13)..(14): 2'-deoxy-2'-fluoro
  misc_feature (16)..(16): 2'-deoxy-2'-fluoro
  misc_feature (18)..(18): 2'-deoxy-2'-fluoro
  misc_feature (21)..(21): 3'-3 attached inverted deoxyabasic moiety.
guucugcucgcguuacacatt

SEQ ID NO: 916 - DNA, 21 bp, Artificial Sequence
  Synthetic
  misc_feature (1)..(1): 5'-3 attached inverted deoxyabasic moiety.
  misc_feature (3)..(4): 2'-deoxy-2'-fluoro
  misc_feature (8)..(9): 2'-deoxy-2'-fluoro
  misc_feature (11)..(14): 2'-deoxy-2'-fluoro
  misc_feature (17)..(19): 2'-deoxy-2'-fluoro
  misc_feature (21)..(21): 3'-3 attached inverted deoxyabasic moiety.
gauugggcugcuuuaaccutt

SEQ ID NO: 917 - DNA, 21 bp, Artificial Sequence
  Synthetic
  misc_feature (1)..(1): 5'-3 attached inverted deoxyabasic moiety.
  misc_feature (1)..(1): 2'-deoxy-2'-fluoro
  misc_feature (4)..(5): 2'-deoxy-2'-fluoro
  misc_feature (7)..(8): 2'-deoxy-2'-fluoro
  misc_feature (11)..(12): 2'-deoxy-2'-fluoro
  misc_feature (16)..(16): 2'-deoxy-2'-fluoro
  misc_feature (19)..(19): 2'-deoxy-2'-fluoro
  misc_feature (21)..(21): 3'-3 attached inverted deoxyabasic moiety.
cgguuaucaaccagguagutt

SEQ ID NO: 918 - DNA, 21 bp, Artificial Sequence
  Synthetic
  misc_feature (1)..(1): 5'-3 attached inverted deoxyabasic moiety.
  misc_feature (3)..(3): 2'-deoxy-2'-fluoro
  misc_feature (6)..(6): 2'-deoxy-2'-fluoro
  misc_feature (10)..(14): 2'-deoxy-2'-fluoro
  misc_feature (16)..(17): 2'-deoxy-2'-fluoro
  misc_feature (21)..(21): 3'-3 attached inverted deoxyabasic moiety.
gguaguggacuucuaccaatt

SEQ ID NO: 919 - DNA, 21 bp, Artificial Sequence
  Synthetic
  misc_feature (1)..(1): 5'-3 attached inverted deoxyabasic moiety.
  misc_feature (2)..(6): 2'-deoxy-2'-fluoro
  misc_feature (10)..(11): 2'-deoxy-2'-fluoro
  misc_feature (13)..(15): 2'-deoxy-2'-fluoro
  misc_feature (17)..(19): 2'-deoxy-2'-fluoro
  misc_feature (21)..(21): 3'-3 attached inverted deoxyabasic moiety.
guucucgaaccaucuaccutt

SEQ ID NO: 920 - DNA, 21 bp, Artificial Sequence
  Synthetic
  misc_feature (1)..(1): 5'-3 attached inverted deoxyabasic moiety.
  misc_feature (1)..(3): 2'-deoxy-2'-fluoro
  misc_feature (5)..(6): 2'-deoxy-2'-fluoro
  misc_feature (12)..(12): 2'-deoxy-2'-fluoro
  misc_feature (18)..(18): 2'-deoxy-2'-fluoro
  misc_feature (21)..(21): 3'-3 attached inverted deoxyabasic moiety.
ccuauuagggauggagauatt

SEQ ID NO: 921 - DNA, 21 bp, Artificial Sequence
  Synthetic
  misc_feature (1)..(1): 5'-3 attached inverted deoxyabasic moiety.
  misc_feature (1)..(5): 2'-deoxy-2'-fluoro
  misc_feature (8)..(8): 2'-deoxy-2'-fluoro
  misc_feature (10)..(10): 2'-deoxy-2'-fluoro
  misc_feature (14)..(14): 2'-deoxy-2'-fluoro
  misc_feature (17)..(17): 2'-deoxy-2'-fluoro
  misc_feature (21)..(21): 3'-3 attached inverted deoxyabasic moiety.
ccuucaacguaggcgaugatt

SEQ ID NO: 922 - DNA, 21 bp, Artificial Sequence
  Synthetic
  misc_feature (1)..(1): 5'-3 attached inverted deoxyabasic moiety.
  misc_feature (1)..(4): 2'-deoxy-2'-fluoro
  misc_feature (8)..(11): 2'-deoxy-2'-fluoro
  misc_feature (13)..(15): 2'-deoxy-2'-fluoro
  misc_feature (17)..(17): 2'-deoxy-2'-fluoro
  misc_feature (19)..(19): 2'-deoxy-2'-fluoro
  misc_feature (21)..(21): 3'-3 attached inverted deoxyabasic moiety.
cuuugaguucugcucgcgutt

SEQ ID NO: 923 - DNA, 21 bp, Artificial Sequence
  Synthetic
  misc_feature (1)..(1): 2'-deoxy-2'-fluoro
  misc_feature (3)..(3): 2'-deoxy-2'-fluoro
  misc_feature (5)..(5): 2'-deoxy-2'-fluoro
  misc_feature (8)..(8): 2'-deoxy-2'-fluoro
  misc_feature (10)..(10): 2'-deoxy-2'-fluoro
  misc_feature (14)..(14): 2'-deoxy-2'-fluoro
  misc_feature (19)..(19): 2'-deoxy-2'-fluoro
  misc_feature (20)..(21): phosphorothioate linkage
uguguaacgcgagcagaactt

SEQ ID NO: 924 - DNA, 21 bp, Artificial Sequence
  Synthetic
  misc_feature (4)..(5): 2'-deoxy-2'-fluoro
  misc_feature (10)..(10): 2'-deoxy-2'-fluoro
  misc_feature (13)..(15): 2'-deoxy-2'-fluoro
  misc_feature (18)..(19): 2'-deoxy-2'-fluoro
  misc_feature (20)..(21): phosphorothioate linkage
agguuaaagcagcccaauctt

SEQ ID NO: 925 - DNA, 21 bp, Artificial Sequence
  Synthetic
  misc_feature (2)..(3): 2'-deoxy-2'-fluoro
  misc_feature (5)..(7): 2'-deoxy-2'-fluoro
  misc_feature (10)..(11): 2'-deoxy-2'-fluoro
  misc_feature (14)..(14): 2'-deoxy-2'-fluoro
  misc_feature (17)..(18): 2'-deoxy-2'-fluoro
  misc_feature (20)..(21): phosphorothioate linkage
acuaccugguugauaaccgtt

SEQ ID NO: 926 - DNA, 21 bp, Artificial Sequence
  Synthetic
  misc_feature (1)..(2): 2'-deoxy-2'-fluoro
  misc_feature (5)..(5): 2'-deoxy-2'-fluoro
  misc_feature (11)..(13): 2'-deoxy-2'-fluoro
  misc_feature (15)..(16): 2'-deoxy-2'-fluoro
  misc_feature (18)..(19): 2'-deoxy-2'-fluoro
  misc_feature (20)..(21): phosphorothioate linkage
uugguagaaguccacuacctt

SEQ ID NO: 927 - DNA, 21 bp, Artificial Sequence
  Synthetic
  misc_feature (4)..(4): 2'-deoxy-2'-fluoro
  misc_feature (8)..(8): 2'-deoxy-2'-fluoro
  misc_feature (11)..(13): 2'-deoxy-2'-fluoro
  misc_feature (19)..(19): 2'-deoxy-2'-fluoro
  misc_feature (20)..(21): phosphorothioate linkage
agguagaugguucgagaactt

SEQ ID NO: 928 - DNA, 21 bp, Artificial Sequence
  Synthetic
  misc_feature (1)..(1): 2'-deoxy-2'-fluoro
  misc_feature (3)..(7): 2'-deoxy-2'-fluoro
  misc_feature (9)..(13): 2'-deoxy-2'-fluoro
  misc_feature (16)..(16): 2'-deoxy-2'-fluoro
  misc_feature (20)..(21): phosphorothioate linkage
uaucuccaucccuaauaggtt

SEQ ID NO: 929 - DNA, 21 bp, Artificial Sequence
  Synthetic
  misc_feature (1)..(2): 2'-deoxy-2'-fluoro
  misc_feature (4)..(5): 2'-deoxy-2'-fluoro
  misc_feature (7)..(9): 2'-deoxy-2'-fluoro
  misc_feature (11)..(11): 2'-deoxy-2'-fluoro
  misc_feature (13)..(14): 2'-deoxy-2'-fluoro
  misc_feature (20)..(21): phosphorothioate linkage
ucaucgccuacguugaaggtt

SEQ ID NO: 930 - DNA, 21 bp, Artificial Sequence
  Synthetic
  misc_feature (2)..(2): 2'-deoxy-2'-fluoro
  misc_feature (4)..(4): 2'-deoxy-2'-fluoro
  misc_feature (8)..(8): 2'-deoxy-2'-fluoro
  misc_feature (13)..(15): 2'-deoxy-2'-fluoro
  misc_feature (20)..(21): phosphorothioate linkage
acgcgagcagaacucaaagtt

SEQ ID NO: 931 - DNA, 21 bp, Artificial Sequence
  Synthetic
  misc_feature (1)..(1): 5'-3 attached inverted deoxyabasic moiety.
  misc_feature (1)..(1): deoxy
  misc_feature (2)..(5): 2'-deoxy-2'-fluoro
  misc_feature (6)..(6): deoxy
  misc_feature (7)..(9): 2'-deoxy-2'-fluoro
  misc_feature (10)..(10): deoxy
  misc_feature (11)..(11): 2'-deoxy-2'-fluoro
  misc_feature (12)..(12): deoxy
  misc_feature (13)..(14): 2'-deoxy-2'-fluoro
  misc_feature (15)..(15): deoxy
  misc_feature (16)..(16): 2'-deoxy-2'-fluoro
  misc_feature (17)..(17): deoxy
  misc_feature (18)..(18): 2'-deoxy-2'-fluoro
  misc_feature (19)..(19): deoxy
  misc_feature (21)..(21): 3'-3 attached inverted deoxyabasic moiety.
guucugcucgcguuacacatt

SEQ ID NO: 932 - DNA, 21 bp, Artificial Sequence
  Synthetic
  misc_feature (1)..(1): 5'-3 attached inverted deoxyabasic moiety.
  misc_feature (1)..(2): deoxy
  misc_feature (3)..(4): 2'-deoxy-2'-fluoro
  misc_feature (5)..(7): deoxy
  misc_feature (8)..(9): 2'-deoxy-2'-fluoro
  misc_feature (10)..(10): deoxy
  misc_feature (11)..(14): 2'-deoxy-2'-fluoro
  misc_feature (15)..(16): deoxy
  misc_feature (17)..(19): 2'-deoxy-2'-fluoro
  misc_feature (21)..(21): 3'-3 attached inverted deoxyabasic moiety.
gauugggcugcuuuaaccutt

SEQ ID NO: 933 - DNA, 21 bp, Artificial Sequence
  Synthetic
  misc_feature (1)..(1): 5'-3 attached inverted deoxyabasic moiety.
  misc_feature (1)..(1): 2'-deoxy-2'-fluoro
  misc_feature (2)..(3): deoxy
  misc_feature (4)..(5): 2'-deoxy-2'-fluoro
  misc_feature (6)..(6): deoxy
  misc_feature (7)..(8): 2'-deoxy-2'-fluoro
  misc_feature (9)..(10): deoxy
  misc_feature (11)..(12): 2'-deoxy-2'-fluoro
  misc_feature (13)..(15): deoxy
  misc_feature (15)..(15): 2'-deoxy-2'-fluoro
  misc_feature (17)..(18): deoxy
  misc_feature (21)..(21): 3'-3 attached inverted deoxyabasic moiety.
cgguuaucaaccagguagutt

SEQ ID NO: 934 - DNA, 21 bp, Artificial Sequence
  Synthetic
  misc_feature (1)..(1): 5'-3 attached inverted deoxyabasic moiety.
  misc_feature (1)..(2): deoxy
  misc_feature (3)..(3): 2'-deoxy-2'-fluoro
  misc_feature (4)..(5): deoxy
  misc_feature (6)..(6): 2'-deoxy-2'-fluoro
  misc_feature (7)..(9): deoxy
  misc_feature (10)..(14): 2'-deoxy-2'-fluoro
  misc_feature (15)..(15): deoxy
  misc_feature (16)..(17): 2'-deoxy-2'-fluoro
  misc_feature (18)..(19): deoxy
  misc_feature (21)..(21): 3'-3 attached inverted deoxyabasic moiety.
gguaguggacuucuaccaatt

SEQ ID NO: 935 - DNA, 21 bp, Artificial Sequence
  Synthetic
  misc_feature (1)..(1): 5'-3 attached inverted deoxyabasic moiety.
  misc_feature (1)..(1): deoxy
  misc_feature (2)..(6): 2'-deoxy-2'-fluoro
  misc_feature (7)..(9): deoxy
  misc_feature (10)..(11): 2'-deoxy-2'-fluoro
  misc_feature (12)..(12): deoxy
  misc_feature (13)..(15): 2'-deoxy-2'-fluoro
  misc_feature (16)..(16): deoxy
  misc_feature (17)..(19): 2'-deoxy-2'-fluoro
  misc_feature (21)..(21): 3'-3 attached inverted deoxyabasic moiety.
guucucgaaccaucuaccutt

SEQ ID NO: 936 - DNA, 21 bp, Artificial Sequence
  Synthetic
  misc_feature (1)..(1): 5'-3 attached inverted deoxyabasic moiety.
  misc_feature (1)..(3): 2'-deoxy-2'-fluoro
  misc_feature (4)..(4): deoxy
  misc_feature (5)..(6): 2'-deoxy-2'-fluoro
  misc_feature (7)..(11): deoxy
  misc_feature (12)..(12): 2'-deoxy-2'-fluoro
  misc_feature (13)..(17): deoxy
  misc_feature (18)..(18): 2'-deoxy-2'-fluoro
  misc_feature (19)..(19): deoxy
  misc_feature (21)..(21): 3'-3 attached inverted deoxyabasic moiety.
ccuauuagggauggagauatt

SEQ ID NO: 937 - DNA, 21 bp, Artificial Sequence
  Synthetic
  misc_feature (1)..(1): 5'-3 attached inverted deoxyabasic moiety.
  misc_feature (1)..(5): 2'-deoxy-2'-fluoro
  misc_feature (6)..(7): deoxy
  misc_feature (8)..(8): 2'-deoxy-2'-fluoro
  misc_feature (9)..(9): deoxy
  misc_feature (10)..(10): 2'-deoxy-2'-fluoro
  misc_feature (11)..(13): deoxy
  misc_feature (14)..(14): 2'-deoxy-2'-fluoro
  misc_feature (15)..(16): deoxy
  misc_feature (17)..(17): 2'-deoxy-2'-fluoro
  misc_feature (18)..(19): deoxy
  misc_feature (21)..(21): 3'-3 attached inverted deoxyabasic moiety.
ccuucaacguaggcgaugatt

SEQ ID NO: 938 - DNA, 21 bp, Artificial Sequence
  Synthetic
  misc_feature (1)..(1): 5'-3 attached inverted deoxyabasic moiety.
  misc_feature (1)..(4): 2'-deoxy-2'-fluoro
  misc_feature (5)..(7): deoxy
  misc_feature (8)..(11): 2'-deoxy-2'-fluoro
  misc_feature (12)..(12): deoxy
  misc_feature (13)..(15): 2'-deoxy-2'-fluoro
  misc_feature (16)..(16): deoxy
  misc_feature (17)..(17): 2'-deoxy-2'-fluoro
  misc_feature (18)..(18): deoxy
  misc_feature (19)..(19): 2'-deoxy-2'-fluoro
  misc_feature (21)..(21): 3'-3 attached inverted deoxyabasic moiety.
cuuugaguucugcucgcgutt

SEQ ID NO: 939 - DNA, 21 bp, Artificial Sequence
  Synthetic
  misc_feature (1)..(1): 2'-deoxy-2'-fluoro
  misc_feature (2)..(2): deoxy
  misc_feature (3)..(3): 2'-deoxy-2'-fluoro
  misc_feature (4)..(4): deoxy
  misc_feature (5)..(5): 2'-deoxy-2'-fluoro
  misc_feature (6)..(7): deoxy
  misc_feature (8)..(8): 2'-deoxy-2'-fluoro
  misc_feature (9)..(9): deoxy
  misc_feature (10)..(10): 2'-deoxy-2'-fluoro
  misc_feature (11)..(13): deoxy
  misc_feature (14)..(14): 2'-deoxy-2'-fluoro
  misc_feature (15)..(18): deoxy
  misc_feature (19)..(19): 2'-deoxy-2'-fluoro
  misc_feature (20)..(21): phosphorothioate linkage
uguguaacgcgagcagaactt

SEQ ID NO: 940 - DNA, 21 bp, Artificial Sequence
  Synthetic
  misc_feature (1)..(3): deoxy
  misc_feature (4)..(5): 2'-deoxy-2'-fluoro
  misc_feature (6)..(9): deoxy
  misc_feature (10)..(10): 2'-deoxy-2'-fluoro
  misc_feature (11)..(12): deoxy
  misc_feature (13)..(15): 2'-deoxy-2'-fluoro
  misc_feature (16)..(17): deoxy
  misc_feature (18)..(19): 2'-deoxy-2'-fluoro
  misc_feature (20)..(21): phosphorothioate linkage
agguuaaagcagcccaauctt

SEQ ID NO: 941 - DNA, 21 bp, Artificial Sequence
  Synthetic
  misc_feature (1)..(1): deoxy
  misc_feature (2)..(3): 2'-deoxy-2'-fluoro
  misc_feature (4)..(4): deoxy
  misc_feature (5)..(7): 2'-deoxy-2'-fluoro
  misc_feature (8)..(9): deoxy
  misc_feature (10)..(11): 2'-deoxy-2'-fluoro
  misc_feature (12)..(13): deoxy
  misc_feature (14)..(14): 2'-deoxy-2'-fluoro
  misc_feature (15)..(16): deoxy
  misc_feature (17)..(18): 2'-deoxy-2'-fluoro
  misc_feature (19)..(19): deoxy
  misc_feature (20)..(21): phosphorothioate linkage
acuaccugguugauaaccgtt

SEQ ID NO: 942 - DNA, 21 bp, Artificial Sequence
  Synthetic
  misc_feature (1)..(2): 2'-deoxy-2'-fluoro
  misc_feature (3)..(4): deoxy
  misc_feature (5)..(5): 2'-deoxy-2'-fluoro
  misc_feature (6)..(10): deoxy
  misc_feature (11)..(13): 2'-deoxy-2'-fluoro
  misc_feature (14)..(14): deoxy
  misc_feature (15)..(16): 2'-deoxy-2'-fluoro
  misc_feature (17)..(17): deoxy
  misc_feature (18)..(19): 2'-deoxy-2'-fluoro
  misc_feature (20)..(21): phosphorothioate linkage
uugguagaaguccacuacctt

SEQ ID NO: 943 - DNA, 21 bp, Artificial Sequence
  Synthetic
  misc_feature (1)..(3): deoxy
  misc_feature (4)..(4): 2'-deoxy-2'-fluoro
  misc_feature (5)..(7): deoxy
  misc_feature (8)..(8): 2'-deoxy-2'-fluoro
  misc_feature (9)..(10): deoxy
  misc_feature (11)..(13): 2'-deoxy-2'-fluoro
  misc_feature (14)..(18): deoxy
  misc_feature (19)..(19): 2'-deoxy-2'-fluoro
  misc_feature (20)..(21): phosphorothioate linkage
agguagaugguucgagaactt

SEQ ID NO: 944 - DNA, 21 bp, Artificial Sequence
  Synthetic
  misc_feature (1)..(1): 2'-deoxy-2'-fluoro
  misc_feature (2)..(2): deoxy
  misc_feature (3)..(7): 2'-deoxy-2'-fluoro
  misc_feature (8)..(8): deoxy
  misc_feature (9)..(13): 2'-deoxy-2'-fluoro
  misc_feature (14)..(15): deoxy
  misc_feature (16)..(16): 2'-deoxy-2'-fluoro
  misc_feature (17)..(19): deoxy
  misc_feature (20)..(21): phosphorothioate linkage
uaucuccaucccuaauaggtt

SEQ ID NO: 945 - DNA, 21 bp, Artificial Sequence
  Synthetic
  misc_feature (1)..(2): 2'-deoxy-2'-fluoro
  misc_feature (3)..(3): deoxy
  misc_feature (4)..(5): 2'-deoxy-2'-fluoro
  misc_feature (6)..(6): deoxy
  misc_feature (7)..(9): 2'-deoxy-2'-fluoro
  misc_feature (10)..(10): deoxy
  misc_feature (11)..(11): 2'-deoxy-2'-fluoro
  misc_feature (12)..(12): deoxy
  misc_feature (13)..(14): 2'-deoxy-2'-fluoro
  misc_feature (15)..(19): deoxy
  misc_feature (20)..(21): phosphorothioate linkage
ucaucgccuacguugaaggtt

SEQ ID NO: 946 - DNA, 21 bp, Artificial Sequence
  Synthetic
  misc_feature (1)..(1): deoxy
  misc_feature (2)..(2): 2'-deoxy-2'-fluoro
  misc_feature (3)..(3): deoxy
  misc_feature (4)..(4): 2'-deoxy-2'-fluoro
  misc_feature (5)..(7): deoxy
  misc_feature (8)..(8): 2'-deoxy-2'-fluoro
  misc_feature (9)..(12): deoxy
  misc_feature (13)..(15): 2'-deoxy-2'-fluoro
  misc_feature (16)..(19): deoxy
  misc_feature (20)..(21): phosphorothioate linkage
acgcgagcagaacucaaagtt

SEQ ID NO: 947 - DNA, 21 bp, Artificial Sequence
  Synthetic
  misc_feature (1)..(1): 5'-3 attached inverted deoxyabasic moiety.
  misc_feature (1)..(1): 2'-O-methyl
  misc_feature (2)..(5): 2'-deoxy-2'-fluoro
  misc_feature (6)..(6): 2'-O-methyl
  misc_feature (7)..(9): 2'-deoxy-2'-fluoro
  misc_feature (10)..(10): 2'-O-methyl
  misc_feature (11)..(11): 2'-deoxy-2'-fluoro
  misc_feature (12)..(12): 2'-O-methyl
  misc_feature (13)..(14): 2'-deoxy-2'-fluoro
  misc_feature (15)..(15): 2'-O-methyl
  misc_feature (16)..(16): 2'-deoxy-2'-fluoro
  misc_feature (17)..(17): 2'-O-methyl
  misc_feature (18)..(18): 2'-deoxy-2'-fluoro
  misc_feature (19)..(19): 2'-O-methyl
  misc_feature (21)..(21): 3'-3 attached inverted deoxyabasic moiety.
guucugcucgcguuacacatt

SEQ ID NO: 948 - DNA, 21 bp, Artificial Sequence
  Synthetic
  misc_feature (1)..(1): 5'-3 attached inverted deoxyabasic moiety.
  misc_feature (1)..(2): 2'-O-methyl
  misc_feature (3)..(4): 2'-deoxy-2'-fluoro
  misc_feature (5)..(7): 2'-O-methyl
  misc_feature (8)..(9): 2'-deoxy-2'-fluoro
  misc_feature (10)..(10): 2'-O-methyl
  misc_feature (11)..(14): 2'-deoxy-2'-fluoro
  misc_feature (15)..(16): 2'-O-methyl
  misc_feature (17)..(19): 2'-deoxy-2'-fluoro
  misc_feature (21)..(21): 3'-3 attached inverted deoxyabasic moiety.
gauugggcugcuuuaaccutt

SEQ ID NO: 949 - DNA, 21 bp, Artificial Sequence
  Synthetic
  misc_feature (1)..(1): 5'-3 attached inverted deoxyabasic moiety.
  misc_feature (1)..(1): 2'-deoxy-2'-fluoro
  misc_feature (2)..(3): 2'-O-methyl
  misc_feature (4)..(5): 2'-deoxy-2'-fluoro
  misc_feature (6)..(6): 2'-O-methyl
  misc_feature (7)..(8): 2'-deoxy-2'-fluoro
  misc_feature (9)..(10): 2'-O-methyl
  misc_feature (11)..(12): 2'-deoxy-2'-fluoro
  misc_feature (13)..(15): 2'-O-methyl
  misc_feature (16)..(16): 2'-deoxy-2'-fluoro
  misc_feature (17)..(18): 2'-O-methyl
  misc_feature (19)..(19): 2'-deoxy-2'-fluoro
  misc_feature (21)..(21): 3'-3 attached inverted deoxyabasic moiety.
cgguuaucaaccagguagutt

SEQ ID NO: 950 - DNA, 21 bp, Artificial Sequence
  Synthetic
  misc_feature (1)..(1): 5'-3 attached inverted deoxyabasic moiety.
  misc_feature (1)..(2): 2'-O-methyl
  misc_feature (3)..(3): 2'-deoxy-2'-fluoro
  misc_feature (4)..(5): 2'-O-methyl
  misc_feature (6)..(6): 2'-deoxy-2'-fluoro
  misc_feature (7)..(9): 2'-O-methyl
  misc_feature (10)..(14): 2'-deoxy-2'-fluoro
  misc_feature (15)..(15): 2'-O-methyl
  misc_feature (16)..(17): 2'-deoxy-2'-fluoro
  misc_feature (18)..(19): 2'-O-methyl
  misc_feature (21)..(21): 3'-3 attached inverted deoxyabasic moiety.
gguaguggacuucuaccaatt

SEQ ID NO: 951 - DNA, 21 bp, Artificial Sequence
  Synthetic
  misc_feature (1)..(1): 5'-3 attached inverted deoxyabasic moiety.
  misc_feature (1)..(1): 2'-O-methyl
  misc_feature (2)..(6): 2'-deoxy-2'-fluoro
  misc_feature (7)..(9): 2'-O-methyl
  misc_feature (10)..(11): 2'-deoxy-2'-fluoro
  misc_feature (12)..(12): 2'-O-methyl
  misc_feature (13)..(15): 2'-deoxy-2'-fluoro
  misc_feature (16)..(16): 2'-O-methyl
  misc_feature (17)..(19): 2'-deoxy-2'-fluoro
  misc_feature (21)..(21): 3'-3 attached inverted deoxyabasic moiety.
guucucgaaccaucuaccutt

SEQ ID NO: 952 - DNA, 21 bp, Artificial Sequence
  Synthetic
  misc_feature (1)..(1): 5'-3 attached inverted deoxyabasic moiety.
  misc_feature (1)..(3): 2'-deoxy-2'-fluoro
  misc_feature (4)..(4): 2'-O-methyl
  misc_feature (5)..(6): 2'-deoxy-2'-fluoro
  misc_feature (7)..(11): 2'-O-methyl
  misc_feature (12)..(12): 2'-deoxy-2'-fluoro
  misc_feature (13)..(17): 2'-O-methyl
  misc_feature (18)..(18): 2'-deoxy-2'-fluoro
  misc_feature (19)..(19): 2'-O-methyl
  misc_feature (21)..(21): 3'-3 attached inverted deoxyabasic moiety.
ccuauuagggauggagauatt

SEQ ID NO: 953 - DNA, 21 bp, Artificial Sequence
  Synthetic
  misc_feature (1)..(1): 5'-3 attached inverted deoxyabasic moiety.
  misc_feature (1)..(5): 2'-deoxy-2'-fluoro
  misc_feature (6)..(7): 2'-O-methyl
  misc_feature (8)..(8): 2'-deoxy-2'-fluoro
  misc_feature (9)..(9): 2'-O-methyl
  misc_feature (10)..(10): 2'-deoxy-2'-fluoro
  misc_feature (11)..(13): 2'-O-methyl
  misc_feature (14)..(14): 2'-deoxy-2'-fluoro
  misc_feature (15)..(16): 2'-O-methyl
  misc_feature (17)..(17): 2'-deoxy-2'-fluoro
  misc_feature (18)..(19): 2'-O-methyl
  misc_feature (21)..(21): 3'-3 attached inverted deoxyabasic moiety.
ccuucaacguaggcgaugatt

SEQ ID NO: 954 - DNA, 21 bp, Artificial Sequence
  Synthetic
  misc_feature (1)..(1): 5'-3 attached inverted deoxyabasic moiety.
  misc_feature (1)..(4): 2'-deoxy-2'-fluoro
  misc_feature (5)..(7): 2'-O-methyl
  misc_feature (7)..(11): 2'-deoxy-2'-fluoro
  misc_feature (12)..(12): 2'-O-methyl
  misc_feature (13)..(15): 2'-deoxy-2'-fluoro
  misc_feature (16)..(16): 2'-O-methyl
  misc_feature (17)..(17): 2'-deoxy-2'-fluoro
  misc_feature (18)..(18): 2'-O-methyl
  misc_feature (19)..(19): 2'-deoxy-2'-fluoro
  misc_feature (21)..(21): 3'-3 attached inverted deoxyabasic moiety.
cuuugaguucugcucgcgutt

SEQ ID NO: 955 - DNA, 21 bp, Artificial Sequence
  Synthetic
  misc_feature (1)..(1): 2'-deoxy-2'-fluoro
  misc_feature (2)..(2): 2'-O-methyl
  misc_feature (3)..(3): 2'-deoxy-2'-fluoro
  misc_feature (4)..(4): 2'-O-methyl
  misc_feature (5)..(5): 2'-deoxy-2'-fluoro
  misc_feature (6)..(7): 2'-O-methyl
  misc_feature (8)..(8): 2'-deoxy-2'-fluoro
  misc_feature (9)..(9): 2'-O-methyl
  misc_feature (10)..(10): 2'-deoxy-2'-fluoro
  misc_feature (11)..(13): 2'-O-methyl
  misc_feature (14)..(14): 2'-deoxy-2'-fluoro
  misc_feature (15)..(18): 2'-O-methyl
  misc_feature (19)..(19): 2'-deoxy-2'-fluoro
  misc_feature (20)..(21): phosphorothioate linkage
uguguaacgcgagcagaactt

SEQ ID NO: 956 - DNA, 21 bp, Artificial Sequence
  Synthetic
  misc_feature (1)..(3): 2'-O-methyl
  misc_feature (4)..(5): 2'-deoxy-2'-fluoro
  misc_feature (6)..(9): 2'-O-methyl
  misc_feature (10)..(10): 2'-deoxy-2'-fluoro
  misc_feature (11)..(12): 2'-O-methyl
  misc_feature (13)..(15): 2'-deoxy-2'-fluoro
  misc_feature (16)..(17): 2'-O-methyl
  misc_feature (18)..(19): 2'-deoxy-2'-fluoro
  misc_feature (20)..(21): phosphorothioate linkage
agguuaaagcagcccaauctt

SEQ ID NO: 957 - DNA, 21 bp, Artificial Sequence
  Synthetic
  misc_feature (1)..(1): 2'-O-methyl
  misc_feature (2)..(3): 2'-deoxy-2'-fluoro
  misc_feature (4)..(4): 2'-O-methyl
  misc_feature (5)..(7): 2'-deoxy-2'-fluoro
  misc_feature (8)..(9): 2'-O-methyl
  misc_feature (10)..(11): 2'-deoxy-2'-fluoro
  misc_feature (12)..(13): 2'-O-methyl
  misc_feature (14)..(14): 2'-deoxy-2'-fluoro
  misc_feature (15)..(16): 2'-O-methyl
  misc_feature (17)..(18): 2'-deoxy-2'-fluoro
  misc_feature (19)..(19): 2'-O-methyl
  misc_feature (20)..(21): phosphorothioate linkage
acuaccugguugauaaccgtt

SEQ ID NO: 958 - DNA, 21 bp, Artificial Sequence
  Synthetic
  misc_feature (1)..(2): 2'-deoxy-2'-fluoro
  misc_feature (3)..(4): 2'-O-methyl
  misc_feature (5)..(5): 2'-deoxy-2'-fluoro
  misc_feature (6)..(10): 2'-O-methyl
  misc_feature (11)..(13): 2'-deoxy-2'-fluoro
  misc_feature (14)..(14): 2'-O-methyl
  misc_feature (15)..(16): 2'-deoxy-2'-fluoro
  misc_feature (17)..(17): 2'-O-methyl
  misc_feature (18)..(19): 2'-deoxy-2'-fluoro
  misc_feature (20)..(21): phosphorothioate linkage
uugguagaaguccacuacctt

SEQ ID NO: 959 - DNA, 21 bp, Artificial Sequence
  Synthetic
  misc_feature (1)..(3): 2'-O-methyl
  misc_feature (4)..(4): 2'-deoxy-2'-fluoro
  misc_feature (5)..(7): 2'-O-methyl
  misc_feature (8)..(8): 2'-deoxy-2'-fluoro
  misc_feature (9)..(10): 2'-O-methyl
  misc_feature (11)..(13): 2'-deoxy-2'-fluoro
  misc_feature (14)..(18): 2'-O-methyl
  misc_feature (19)..(19): 2'-deoxy-2'-fluoro
  misc_feature (20)..(21): phosphorothioate linkage
agguagaugguucgagaactt

SEQ ID NO: 960 - DNA, 21 bp, Artificial Sequence
  Synthetic
  misc_feature (1)..(1): 2'-deoxy-2'-fluoro
  misc_feature (2)..(2): 2'-O-methyl
  misc_feature (3)..(7): 2'-deoxy-2'-fluoro
  misc_feature (8)..(8): 2'-O-methyl
  misc_feature (9)..(13): 2'-deoxy-2'-fluoro
  misc_feature (14)..(15): 2'-O-methyl
  misc_feature (16)..(16): 2'-deoxy-2'-fluoro
  misc_feature (17)..(19): 2'-O-methyl
  misc_feature (20)..(21): phosphorothioate linkage
uaucuccaucccuaauaggtt

SEQ ID NO: 961 - DNA, 21 bp, Artificial Sequence
  Synthetic
  misc_feature (1)..(2): 2'-deoxy-2'-fluoro
  misc_feature (3)..(3): 2'-O-methyl
  misc_feature (4)..(5): 2'-deoxy-2'-fluoro
  misc_feature (6)..(6): 2'-O-methyl
  misc_feature (7)..(9): 2'-deoxy-2'-fluoro
  misc_feature (10)..(10): 2'-O-methyl
  misc_feature (11)..(11): 2'-deoxy-2'-fluoro
  misc_feature (12)..(12): 2'-O-methyl
  misc_feature (13)..(14): 2'-deoxy-2'-fluoro
  misc_feature (15)..(19): 2'-O-methyl
  misc_feature (20)..(21): phosphorothioate linkage
ucaucgccuacguugaaggtt

SEQ ID NO: 962 - DNA, 21 bp, Artificial Sequence
  Synthetic
  misc_feature (1)..(1): 2'-O-methyl
  misc_feature (2)..(2): 2'-deoxy-2'-fluoro
  misc_feature (3)..(3): 2'-O-methyl
  misc_feature (4)..(4): 2'-deoxy-2'-fluoro
  misc_feature (5)..(7): 2'-O-methyl
  misc_feature (8)..(8): 2'-deoxy-2'-fluoro
  misc_feature (9)..(12): 2'-O-methyl
  misc_feature (13)..(15): 2'-deoxy-2'-fluoro
  misc_feature (16)..(19): 2'-O-methyl
  misc_feature (20)..(21): phosphorothioate linkage
acgcgagcagaacucaaagtt

SEQ ID NO: 963 - DNA, 21 bp, Artificial Sequence
  Synthetic
  misc_feature (1)..(1): 5'-3 attached inverted deoxyabasic moiety.
  misc_feature (21)..(21): 3'-3 attached inverted deoxyabasic moiety.
guucugcucgcguuacacatt

SEQ ID NO: 964 - DNA, 21 bp, Artificial Sequence
  Synthetic
  misc_feature (1)..(1): 5'-3 attached inverted deoxyabasic moiety.
  misc_feature (21)..(21): 3'-3 attached inverted deoxyabasic moiety.
gauugggcugcuuuaaccutt

SEQ ID NO: 965 - DNA, 21 bp, Artificial Sequence
  Synthetic
  misc_feature (1)..(1): 5'-3 attached inverted deoxyabasic moiety.
  misc_feature (21)..(21): 3'-3 attached inverted deoxyabasic moiety.
cgguuaucaaccagguagutt

SEQ ID NO: 966 - DNA, 21 bp, Artificial Sequence
  Synthetic
  misc_feature (1)..(1): 5'-3 attached inverted deoxyabasic moiety.
  misc_feature (21)..(21): 3'-3 attached inverted deoxyabasic moiety.
gguaguggacuucuaccaatt

SEQ ID NO: 967 - DNA, 21 bp, Artificial Sequence
  Synthetic
  misc_feature (1)..(1): 5'-3 attached inverted deoxyabasic moiety.
  misc_feature (21)..(21): 3'-3 attached inverted deoxyabasic moiety.
guucucgaaccaucuaccutt

SEQ ID NO: 968 - DNA, 21 bp, Artificial Sequence
  Synthetic
  misc_feature (1)..(1): 5'-3 attached inverted deoxyabasic moiety.
  misc_feature (21)..(21): 3'-3 attached inverted deoxyabasic moiety.
ccuauuagggauggagauatt

SEQ ID NO: 969 - DNA, 21 bp, Artificial Sequence
  Synthetic
  misc_feature (1)..(1): 5'-3 attached inverted deoxyabasic moiety.
  misc_feature (21)..(21): 3'-3 attached inverted deoxyabasic moiety.
ccuucaacguaggcgaugatt

SEQ ID NO: 970 - DNA, 21 bp, Artificial Sequence
  Synthetic
  misc_feature (1)..(1): 5'-3 attached inverted deoxyabasic moiety.
  misc_feature (21)..(21): 3'-3 attached inverted deoxyabasic moiety.
cuuugaguucugcucgcgutt

SEQ ID NO: 971 - DNA, 21 bp, Artificial Sequence
  Synthetic
  misc_feature (20)..(21): phosphorothioate linkage
uguguaacgcgagcagaactt

SEQ ID NO: 972 - DNA, 21 bp, Artificial Sequence
  Synthetic
  misc_feature (20)..(21): phosphorothioate linkage
agguuaaagcagcccaauctt

SEQ ID NO: 973 - DNA, 21 bp, Artificial Sequence
  Synthetic
  misc_feature (20)..(21): phosphorothioate linkage
acuaccugguugauaaccgtt

SEQ ID NO: 974 - DNA, 21 bp, Artificial Sequence
  Synthetic
  misc_feature (20)..(21): phosphorothioate linkage
uugguagaaguccacuacctt

SEQ ID NO: 975 - DNA, 21 bp, Artificial Sequence
  Synthetic
  misc_feature (20)..(21): phosphorothioate linkage
agguagaugguucgagaactt

SEQ ID NO: 976 - DNA, 21 bp, Artificial Sequence
  Synthetic
  misc_feature (20)..(21): phosphorothioate linkage
uaucuccaucccuaauaggtt

SEQ ID NO: 977 - DNA, 21 bp, Artificial Sequence
  Synthetic
  misc_feature (20)..(21): phosphorothioate linkage
ucaucgccuacguugaaggtt

SEQ ID NO: 978 - DNA, 21 bp, Artificial Sequence
  Synthetic
  misc_feature (20)..(21): phosphorothioate linkage
acgcgagcagaacucaaagtt

SEQ ID NO: 979 - DNA, 21 bp, Artificial Sequence
  Synthetic
  misc_feature (1)..(1): 2'-deoxy-2'-fluoro
  misc_feature (2)..(2): 2'-O-methyl
  misc_feature (3)..(3): 2'-deoxy-2'-fluoro
  misc_feature (4)..(4): 2'-O-methyl
  misc_feature (5)..(5): 2'-deoxy-2'-fluoro
  misc_feature (6)..(7): 2'-O-methyl
  misc_feature (8)..(8): 2'-deoxy-2'-fluoro
  misc_feature (9)..(9): 2'-O-methyl
  misc_feature (10)..(10): 2'-deoxy-2'-fluoro
  misc_feature (11)..(13): 2'-O-methyl
  misc_feature (14)..(14): 2'-deoxy-2'-fluoro
  misc_feature (15)..(18): 2'-O-methyl
  misc_feature (21)..(21): 3'-3 attached inverted deoxyabasic moiety.
uguguaacgcgagcagaactt

SEQ ID NO: 980 - DNA, 21 bp, Artificial Sequence
  Synthetic
  misc_feature (1)..(3): 2'-O-methyl
  misc_feature (4)..(5): 2'-deoxy-2'-fluoro
  misc_feature (6)..(9): 2'-O-methyl
  misc_feature (10)..(10): 2'-deoxy-2'-fluoro
  misc_feature (11)..(12): 2'-O-methyl
  misc_feature (13)..(15): 2'-deoxy-2'-fluoro
  misc_feature (16)..(17): 2'-O-methyl
  misc_feature (18)..(19): 2'-deoxy-2'-fluoro
  misc_feature (21)..(21): 3'-3 attached inverted deoxyabasic moiety.
agguuaaagcagcccaauctt

SEQ ID NO: 981 - DNA, 21 bp, Artificial Sequence
  Synthetic
  misc_feature (1)..(1): 2'-O-methyl
  misc_feature (2)..(3): 2'-deoxy-2'-fluoro
  misc_feature (4)..(4): 2'-O-methyl
  misc_feature (5)..(7): 2'-deoxy-2'-fluoro
  misc_feature (8)..(9): 2'-O-methyl
  misc_feature (10)..(11): 2'-deoxy-2'-fluoro
  misc_feature (12)..(13): 2'-O-methyl
  misc_feature (14)..(14): 2'-deoxy-2'-fluoro
  misc_feature (15)..(16): 2'-O-methyl
  misc_feature (17)..(18): 2'-deoxy-2'-fluoro
  misc_feature (19)..(19): 2'-O-methyl
  misc_feature (21)..(21): 3'-3 attached inverted deoxyabasic moiety.
acuaccugguugauaaccgtt

SEQ ID NO: 982 - DNA, 21 bp, Artificial Sequence
  Synthetic
  misc_feature (1)..(2): 2'-deoxy-2'-fluoro
  misc_feature (3)..(4): 2'-O-methyl
  misc_feature (5)..(5): 2'-deoxy-2'-fluoro
  misc_feature (6)..(10): 2'-O-methyl
  misc_feature (11)..(13): 2'-deoxy-2'-fluoro
  misc_feature (14)..(14): 2'-O-methyl
  misc_feature (15)..(16): 2'-deoxy-2'-fluoro
  misc_feature (17)..(17): 2'-O-methyl
  misc_feature (18)..(19): 2'-deoxy-2'-fluoro
  misc_feature (21)..(21): 3'-3 attached inverted deoxyabasic moiety.
uugguagaaguccacuacctt

SEQ ID NO: 983 - DNA, 21 bp, Artificial Sequence
  Synthetic
  misc_feature (1)..(3): 2'-O-methyl
  misc_feature (4)..(4): 2'-deoxy-2'-fluoro
  misc_feature (5)..(7): 2'-O-methyl
  misc_feature (8)..(8): 2'-deoxy-2'-fluoro
  misc_feature (9)..(10): 2'-O-methyl
  misc_feature (11)..(13): 2'-deoxy-2'-fluoro
  misc_feature (14)..(18): 2'-O-methyl
  misc_feature (19)..(19): 2'-deoxy-2'-fluoro
  misc_feature (21)..(21): 3'-3 attached inverted deoxyabasic moiety.
agguagaugguucgagaactt

SEQ ID NO: 984 - DNA, 21 bp, Artificial Sequence
  Synthetic
  misc_feature (1)..(1): 2'-deoxy-2'-fluoro
  misc_feature (2)..(2): 2'-O-methyl
  misc_feature (3)..(7): 2'-deoxy-2'-fluoro
  misc_feature (8)..(8): 2'-O-methyl
  misc_feature (9)..(13): 2'-deoxy-2'-fluoro
  misc_feature (14)..(15): 2'-O-methyl
  misc_feature (16)..(16): 2'-deoxy-2'-fluoro
  misc_feature (17)..(19): 2'-O-methyl
  misc_feature (21)..(21): 3'-3 attached inverted deoxyabasic moiety.
uaucuccaucccuaauaggtt

SEQ ID NO: 985 - DNA, 21 bp, Artificial Sequence
  Synthetic
  misc_feature (1)..(2): 2'-deoxy-2'-fluoro
  misc_feature (3)..(3): 2'-O-methyl
  misc_feature (4)..(5): 2'-deoxy-2'-fluoro
  misc_feature (6)..(6): 2'-O-methyl
  misc_feature (7)..(9): 2'-deoxy-2'-fluoro
  misc_feature (10)..(10): 2'-O-methyl
  misc_feature (11)..(11): 2'-deoxy-2'-fluoro
  misc_feature (12)..(12): 2'-O-methyl
  misc_feature (13)..(14): 2'-deoxy-2'-fluoro
  misc_feature (15)..(19): 2'-O-methyl
  misc_feature (21)..(21): 3'-3 attached inverted deoxyabasic moiety.
ucaucgccuacguugaaggtt

SEQ ID NO: 986 - DNA, 21 bp, Artificial Sequence
  Synthetic
  misc_feature (1)..(1): 2'-O-methyl
  misc_feature (2)..(2): 2'-deoxy-2'-fluoro
  misc_feature (3)..(3): 2'-O-methyl
  misc_feature (4)..(4): 2'-deoxy-2'-fluoro
  misc_feature (5)..(7): 2'-O-methyl
  misc_feature (8)..(8): 2'-deoxy-2'-fluoro
  misc_feature (9)..(12): 2'-O-methyl
  misc_feature (13)..(15): 2'-deoxy-2'-fluoro
  misc_feature (16)..(19): 2'-O-methyl
  misc_feature (21)..(21): 3'-3 attached inverted deoxyabasic moiety.
acgcgagcagaacucaaagtt

SEQ ID NO: 987 - DNA, 21 bp, Artificial Sequence
  Synthetic
  misc_feature (21)..(21): 3'-3 attached inverted deoxyabasic moiety.
uguguaacgcgagcagaactt

SEQ ID NO: 988 - DNA, 21 bp, Artificial Sequence
  Synthetic
  misc_feature (21)..(21): 3'-3 attached inverted deoxyabasic moiety.
agguuaaagcagcccaauctt

SEQ ID NO: 989 - DNA, 21 bp, Artificial Sequence
  Synthetic
  misc_feature (21)..(21): 3'-3 attached inverted deoxyabasic moiety.
acuaccugguugauaaccgtt

SEQ ID NO: 990 - DNA, 21 bp, Artificial Sequence
  Synthetic
  misc_feature (21)..(21): 3'-3 attached inverted deoxyabasic moiety.
uugguagaaguccacuacctt

SEQ ID NO: 991 - DNA, 21 bp, Artificial Sequence
  Synthetic
  misc_feature (21)..(21): 3'-3 attached inverted deoxyabasic moiety.
agguagaugguucgagaactt

SEQ ID NO: 992 - DNA, 21 bp, Artificial Sequence
  Synthetic
  misc_feature (21)..(21): 3'-3 attached inverted deoxyabasic moiety.
uaucuccaucccuaauaggtt

SEQ ID NO: 993 - DNA, 21 bp, Artificial Sequence
  Synthetic
  misc_feature (21)..(21): 3'-3 attached inverted deoxyabasic moiety.
ucaucgccuacguugaaggtt

SEQ ID NO: 994 - DNA, 21 bp, Artificial Sequence
  Synthetic
  misc_feature (21)..(21): 3'-3 attached inverted deoxyabasic moiety.
acgcgagcagaacucaaagtt

SEQ ID NO: 995 - DNA, 21 bp, Artificial Sequence
  Synthetic
  misc_feature (4)..(4): 2'-O-methyl
  misc_feature (5)..(5): 2'-deoxy-2'-fluoro
  misc_feature (6)..(7): 2'-O-methyl
  misc_feature (8)..(8): 2'-deoxy-2'-fluoro
  misc_feature (9)..(9): 2'-O-methyl
  misc_feature (10)..(10): 2'-deoxy-2'-fluoro
  misc_feature (11)..(13): 2'-O-methyl
  misc_feature (14)..(14): 2'-deoxy-2'-fluoro
  misc_feature (15)..(18): 2'-O-methyl
  misc_feature (19)..(19): 2'-deoxy-2'-fluoro
  misc_feature (20)..(21): phosphorothioate linkage
uguguaacgcgagcagaactt

SEQ ID NO: 996 - DNA, 21 bp, Artificial Sequence
  Synthetic
  misc_feature (4)..(5): 2'-deoxy-2'-fluoro
  misc_feature (6)..(9): 2'-O-methyl
  misc_feature (10)..(10): 2'-deoxy-2'-fluoro
  misc_feature (11)..(12): 2'-O-methyl
  misc_feature (13)..(15): 2'-deoxy-2'-fluoro
  misc_feature (16)..(17): 2'-O-methyl
  misc_feature (18)..(19): 2'-deoxy-2'-fluoro
  misc_feature (20)..(21): phosphorothioate linkage
agguuaaagcagcccaauctt

SEQ ID NO: 997 - DNA, 21 bp, Artificial Sequence
  Synthetic
  misc_feature (4)..(4): 2'-O-methyl
  misc_feature (5)..(7): 2'-deoxy-2'-fluoro
  misc_feature (8)..(9): 2'-O-methyl
  misc_feature (10)..(11): 2'-deoxy-2'-fluoro
  misc_feature (12)..(13): 2'-O-methyl
  misc_feature (14)..(14): 2'-deoxy-2'-fluoro
  misc_feature (15)..(16): 2'-O-methyl
  misc_feature (17)..(18): 2'-deoxy-2'-fluoro
  misc_feature (19)..(19): 2'-O-methyl
  misc_feature (20)..(21): phosphorothioate linkage
acuaccugguugauaaccgtt

SEQ ID NO: 998 - DNA, 21 bp, Artificial Sequence
  Synthetic
  misc_feature (4)..(4): 2'-O-methyl
  misc_feature (5)..(5): 2'-deoxy-2'-fluoro
  misc_feature (6)..(10): 2'-O-methyl
  misc_feature (11)..(13): 2'-deoxy-2'-fluoro
  misc_feature (14)..(14): 2'-O-methyl
  misc_feature (15)..(16): 2'-deoxy-2'-fluoro
  misc_feature (17)..(17): 2'-O-methyl
  misc_feature (18)..(19): 2'-deoxy-2'-fluoro
  misc_feature (20)..(21): phosphorothioate linkage
uugguagaaguccacuacctt

SEQ ID NO: 999 - DNA, 21 bp, Artificial Sequence
  Synthetic
  misc_feature (4)..(4): 2'-deoxy-2'-fluoro
  misc_feature (5)..(7): 2'-O-methyl
  misc_feature (8)..(8): 2'-deoxy-2'-fluoro
  misc_feature (9)..(10): 2'-O-methyl
  misc_feature (11)..(13): 2'-deoxy-2'-fluoro
  misc_feature (14)..(18): 2'-O-methyl
  misc_feature (19)..(19): 2'-deoxy-2'-fluoro
  misc_feature (20)..(21): phosphorothioate linkage
agguagaugguucgagaactt

SEQ ID NO: 1000 - DNA, 21 bp, Artificial Sequence
  Synthetic
  misc_feature (4)..(7): 2'-deoxy-2'-fluoro
  misc_feature (8)..(8): 2'-O-methyl
  misc_feature (9)..(13): 2'-deoxy-2'-fluoro
  misc_feature (14)..(15): 2'-O-methyl
  misc_feature (16)..(16): 2'-deoxy-2'-fluoro
  misc_feature (17)..(19): 2'-O-methyl
  misc_feature (20)..(21): phosphorothioate linkage
uaucuccaucccuaauaggtt

SEQ ID NO: 1001 - DNA, 21 bp, Artificial Sequence
  Synthetic
  misc_feature (4)..(5): 2'-deoxy-2'-fluoro
  misc_feature (6)..(6): 2'-O-methyl
  misc_feature (7)..(9): 2'-deoxy-2'-fluoro
  misc_feature (10)..(10): 2'-O-methyl
  misc_feature (11)..(11): 2'-deoxy-2'-fluoro
  misc_feature (12)..(12): 2'-O-methyl
  misc_feature (13)..(14): 2'-deoxy-2'-fluoro
  misc_feature (15)..(19): 2'-O-methyl
  misc_feature (20)..(21): phosphorothioate linkage
ucaucgccuacguugaaggtt

SEQ ID NO: 1002 - DNA, 21 bp, Artificial Sequence
  Synthetic
  misc_feature (4)..(4): 2'-deoxy-2'-fluoro
  misc_feature (5)..(7): 2'-O-methyl
  misc_feature (8)..(8): 2'-deoxy-2'-fluoro
  misc_feature (9)..(12): 2'-O-methyl
  misc_feature (13)..(15): 2'-deoxy-2'-fluoro
  misc_feature (16)..(19): 2'-O-methyl
  misc_feature (20)..(21): phosphorothioate linkage
acgcgagcagaacucaaagtt

SEQ ID NO: 1003 - RNA, 19 nt, Artificial Sequence
  Synthetic
agguuguggggccgccgcc

SEQ ID NO: 1004 - RNA, 19 nt, Artificial Sequence
  Synthetic
cgcggagcaccguccccgc

SEQ ID NO: 1005 - RNA, 19 nt, Artificial Sequence
  Synthetic
ccgccgcccgagcccgagc

SEQ ID NO: 1006 - RNA, 19 nt, Artificial Sequence
  Synthetic
cccgagcccgcgcacccgc

SEQ ID NO: 1007 - RNA, 19 nt, Artificial Sequence
  Synthetic
cccgcgccgccgccgccgc

SEQ ID NO: 1008 - RNA, 19 nt, Artificial Sequence
  Synthetic
ccgcccgaacagccuccca

SEQ ID NO: 1009 - RNA, 19 nt, Artificial Sequence
  Synthetic
agccugggcccccggcggc

SEQ ID NO: 1010 - RNA, 19 nt, Artificial Sequence
  Synthetic
cgccguggccgcgucccgg

SEQ ID NO: 1011 - RNA, 19 nt, Artificial Sequence
  Synthetic
gcugucgccgcccgagccc

SEQ ID NO: 1012 - RNA, 19 nt, Artificial Sequence
  Synthetic
cgagcccgcgcgccggcgg

SEQ ID NO: 1013 - RNA, 19 nt, Artificial Sequence
  Synthetic
gguggcggcgcaggcugag

SEQ ID NO: 1014 - RNA, 19 nt, Artificial Sequence
  Synthetic
ggagaugcggcgcggagcg

SEQ ID NO: 1015 - RNA, 19 nt, Artificial Sequence
  Synthetic
gccggagcagggcuagagc

SEQ ID NO: 1016 - RNA, 19 nt, Artificial Sequence
  Synthetic
ccggccgccgccgcccgcc

SEQ ID NO: 1017 - RNA, 19 nt, Artificial Sequence
  Synthetic
cgcgguaagcgcagccccg

SEQ ID NO: 1018 - RNA, 19 nt, Artificial Sequence
  Synthetic
ggcccggcgcccgcgggcc

SEQ ID NO: 1019 - RNA, 19 nt, Artificial Sequence
  Synthetic
cauuguccgccgcccgccc

SEQ ID NO: 1020 - RNA, 19 nt, Artificial Sequence
  Synthetic
ccgcgccccgcgcagccug

SEQ ID NO: 1021 - RNA, 19 nt, Artificial Sequence
  Synthetic
gcaggccuuggagcccgcg

SEQ ID NO: 1022 - RNA, 19 nt, Artificial Sequence
  Synthetic
ggcagguggacgccgccgg

SEQ ID NO: 1023 - RNA, 19 nt, Artificial Sequence
  Synthetic
guccacacccgccccgcgc

SEQ ID NO: 1024 - RNA, 19 nt, Artificial Sequence
  Synthetic
cgcggccgugggaggcggg

SEQ ID NO: 1025 - RNA, 19 nt, Artificial Sequence
  Synthetic
gggccagcgcuggccgcgc

SEQ ID NO: 1026 - RNA, 19 nt, Artificial Sequence
  Synthetic
cgccgugggacccgccggu

SEQ ID NO: 1027 - RNA, 19 nt, Artificial Sequence
  Synthetic
uccccagggccgcccggcc

SEQ ID NO: 1028 - RNA, 19 nt, Artificial Sequence
  Synthetic
cccuucuggaccuuuccac

SEQ ID NO: 1029 - RNA, 19 nt, Artificial Sequence
  Synthetic
cccgcgccgcgaggcggcu

SEQ ID NO: 1030 - RNA, 19 nt, Artificial Sequence
  Synthetic
uucgcccgccggggcgggg

SEQ ID NO: 1031 - RNA, 19 nt, Artificial Sequence
  Synthetic
ggcgcgggggugggcacgg

SEQ ID NO: 1032 - RNA, 19 nt, Artificial Sequence
  Synthetic
gcaggcagcggcgccgucu

SEQ ID NO: 1033 - RNA, 19 nt, Artificial Sequence
  Synthetic
ucccggugcggggcccgcg

SEQ ID NO: 1034 - RNA, 19 nt, Artificial Sequence
  Synthetic
gccccccgagcagguucau

SEQ ID NO: 1035 - RNA, 19 nt, Artificial Sequence
  Synthetic
ucugcagaagccagcggac

SEQ ID NO: 1036 - RNA, 19 nt, Artificial Sequence
  Synthetic
cgccucuguucaacuugug

SEQ ID NO: 1037 - RNA, 19 nt, Artificial Sequence
  Synthetic
ggguuaccuggcucaugag

SEQ ID NO: 1038 - RNA, 19 nt, Artificial Sequence
  Synthetic
gaccuugccggcgaggcuc

SEQ ID NO: 1039 - RNA, 19 nt, Artificial Sequence
  Synthetic
cggcgcuugaacgucugug

SEQ ID NO: 1040 - RNA, 19 nt, Artificial Sequence
  Synthetic
gacccagcccucaccgucc

SEQ ID NO: 1041 - RNA, 19 nt, Artificial Sequence
  Synthetic
ccgguacuuguauguguug

SEQ ID NO: 1042 - RNA, 19 nt, Artificial Sequence
  Synthetic
ggugggaguuuggagcucg

SEQ ID NO: 1043 - RNA, 19 nt, Artificial Sequence
  Synthetic
guuggagcuaucguuuccg

SEQ ID NO: 1044 - RNA, 19 nt, Artificial Sequence
  Synthetic
guggaaauuuugagccauu

SEQ ID NO: 1045 - RNA, 19 nt, Artificial Sequence
  Synthetic
uucgaaucacuuaaaggag

SEQ ID NO: 1046 - RNA, 19 nt, Artificial Sequence
  Synthetic
guggacauugcuagcaaug

SEQ ID NO: 1047 - RNA, 19 nt, Artificial Sequence
  Synthetic
gagcucccaaagccaucca

SEQ ID NO: 1048 - RNA, 19 nt, Artificial Sequence
  Synthetic
agauggacuuucuggccga

SEQ ID NO: 1049 - RNA, 19 nt, Artificial Sequence
  Synthetic
agaccagccaguggagcug

SEQ ID NO: 1050 - RNA, 19 nt, Artificial Sequence
  Synthetic
gcugaauccugcccgcgug

SEQ ID NO: 1051 - RNA, 19 nt, Artificial Sequence
  Synthetic
gaaccacaugcccagcacg

SEQ ID NO: 1052 - RNA, 19 nt, Artificial Sequence
  Synthetic
gguggauguggccacggcg

SEQ ID NO: 1053 - RNA, 19 nt, Artificial Sequence
  Synthetic
gcugccucugcaaguggcc

SEQ ID NO: 1054 - RNA, 19 nt, Artificial Sequence
  Synthetic
ccccucggcagugcccaug

SEQ ID NO: 1055 - RNA, 19 nt, Artificial Sequence
  Synthetic
ggaccugcgccuggaccac

SEQ ID NO: 1056 - RNA, 19 nt, Artificial Sequence
  Synthetic
ccaguucucacugccugug

SEQ ID NO: 1057 - RNA, 19 nt, Artificial Sequence
  Synthetic
ggcagagccggcccugcgg

SEQ ID NO: 1058 - RNA, 19 nt, Artificial Sequence
  Synthetic
ggagcagcagcugcagcag

SEQ ID NO: 1059 - RNA, 19 nt, Artificial Sequence
  Synthetic
ggagcuccuggcgcucaag

SEQ ID NO: 1060 - RNA, 19 nt, Artificial Sequence
  Synthetic
gcagaagcagcagauccag

SEQ ID NO: 1061 - RNA, 19 nt, Artificial Sequence
  Synthetic
gaggcagauccucaucgcu

SEQ ID NO: 1062 - RNA, 19 nt, Artificial Sequence
  Synthetic
ugaguuccagaggcagcac

SEQ ID NO: 1063 - RNA, 19 nt, Artificial Sequence
  Synthetic
cgagcagcucucccggcag

SEQ ID NO: 1064 - RNA, 19 nt, Artificial Sequence
  Synthetic
gcacgaggcgcagcuccac

SEQ ID NO: 1065 - RNA, 19 nt, Artificial Sequence
  Synthetic
cgagcacaucaagcaacaa

SEQ ID NO: 1066 - RNA, 19 nt, Artificial Sequence
  Synthetic
acaggagaugcuggccaug

SEQ ID NO: 1067 - RNA, 19 nt, Artificial Sequence
  Synthetic
gaagcaccagcaggagcug

SEQ ID NO: 1068 - RNA, 19 nt, Artificial Sequence
  Synthetic
gcuggaacaccagcggaag

SEQ ID NO: 1069 - RNA, 19 nt, Artificial Sequence
  Synthetic
gcuggagaggcaccgccag

SEQ ID NO: 1070 - RNA, 19 nt, Artificial Sequence
  Synthetic
ggagcaggagcuggagaag

SEQ ID NO: 1071 - RNA, 19 nt, Artificial Sequence
  Synthetic
gcagcaccgggagcagaag

SEQ ID NO: 1072 - RNA, 19 nt, Artificial Sequence
  Synthetic
gcugcagcagcucaagaac

SEQ ID NO: 1073 - RNA, 19 nt, Artificial Sequence
  Synthetic
caaggagaagggcaaagag

SEQ ID NO: 1074 - RNA, 19 nt, Artificial Sequence
  Synthetic
gagugccguggccagcaca

SEQ ID NO: 1075 - RNA, 19 nt, Artificial Sequence
  Synthetic
agaagugaagaugaaguua

SEQ ID NO: 1076 - RNA, 19 nt, Artificial Sequence
  Synthetic
acaagaauuuguccucaau

SEQ ID NO: 1077 - RNA, 19 nt, Artificial Sequence
  Synthetic
uaaaaagaaggcgcuggcc

SEQ ID NO: 1078 - RNA, 19 nt, Artificial Sequence
  Synthetic
ccaccggaaucugaaccac

SEQ ID NO: 1079 - RNA, 19 nt, Artificial Sequence
  Synthetic
cugcauuuccagcgacccu

SEQ ID NO: 1080 - RNA, 19 nt, Artificial Sequence
  Synthetic
ucgcuacugguacgggaaa

SEQ ID NO: 1081 - RNA, 19 nt, Artificial Sequence
  Synthetic
aacgcagcacaguucccuu

SEQ ID NO: 1082 - RNA, 19 nt, Artificial Sequence
  Synthetic
ugaccagaguucuccaccc

SEQ ID NO: 1083 - RNA, 19 nt, Artificial Sequence
  Synthetic
ccagagcggagugucgacc

SEQ ID NO: 1084 - RNA, 19 nt, Artificial Sequence
  Synthetic
cuccuauaaccacccgguc

SEQ ID NO: 1085 - RNA, 19 nt, Artificial Sequence
  Synthetic
ccugggaauguacgacgcc

SEQ ID NO: 1086 - RNA, 19 nt, Artificial Sequence
  Synthetic
caaagaugacuucccucuu

SEQ ID NO: 1087 - RNA, 19 nt, Artificial Sequence
  Synthetic
uaggaaaacagcuucugaa

SEQ ID NO: 1088 - RNA, 19 nt, Artificial Sequence
  Synthetic
accgaaucugaaauuacgg

SEQ ID NO: 1089 - RNA, 19 nt, Artificial Sequence
  Synthetic
guccaggcuaaagcagaaa

SEQ ID NO: 1090 - RNA, 19 nt, Artificial Sequence
  Synthetic
aguggccgaaagacggagc

SEQ ID NO: 1091 - RNA, 19 nt, Artificial Sequence
  Synthetic
cagcccccuguuacgcagg

SEQ ID NO: 1092 - RNA, 19 nt, Artificial Sequence
  Synthetic
gaaagacgggccagugguc

SEQ ID NO: 1093 - RNA, 19 nt, Artificial Sequence
  Synthetic
cacugcucuaaaaaagcgu

SEQ ID NO: 1094 - RNA, 19 nt, Artificial Sequence
  Synthetic
uccguuggaugucacagac

SEQ ID NO: 1095 - RNA, 19 nt, Artificial Sequence
  Synthetic
cuccgcgugcagcagcgcc

SEQ ID NO: 1096 - RNA, 19 nt, Artificial Sequence
  Synthetic
cccaggcuccggacccagc

SEQ ID NO: 1097 - RNA, 19 nt, Artificial Sequence
  Synthetic
cucacccaacaacagcucc

SEQ ID NO: 1098 - RNA, 19 nt, Artificial Sequence
  Synthetic
cgggagcgucagcgcggag

SEQ ID NO: 1099 - RNA, 19 nt, Artificial Sequence
  Synthetic
gaacgguaucgcgcccgcc

SEQ ID NO: 1100 - RNA, 19 nt, Artificial Sequence
  Synthetic
cguccccagcaucccggcg

SEQ ID NO: 1101 - RNA, 19 nt, Artificial Sequence
  Synthetic
ggagacgaguuuggcgcac

SEQ ID NO: 1102 - RNA, 19 nt, Artificial Sequence
  Synthetic
cagacuuguggcacgagaa

SEQ ID NO: 1103 - RNA, 19 nt, Artificial Sequence
  Synthetic
aggcucggccgcuccacuu

SEQ ID NO: 1104 - RNA, 19 nt, Artificial Sequence
  Synthetic
uccccucuacacaucgcca

SEQ ID NO: 1105 - RNA, 19 nt, Artificial Sequence
  Synthetic
auccuugcccaacaucacg

SEQ ID NO: 1106 - RNA, 19 nt, Artificial Sequence
  Synthetic
gcugggccugccugccacc

SEQ ID NO: 1107 - RNA, 19 nt, Artificial Sequence
  Synthetic
cggccccucugcgggcacg

SEQ ID NO: 1108 - RNA, 19 nt, Artificial Sequence
  Synthetic
ggcgggccagcaggacacc

SEQ ID NO: 1109 - RNA, 19 nt, Artificial Sequence
  Synthetic
cgagagacucacccuuccc

SEQ ID NO: 1110 - RNA, 19 nt, Artificial Sequence
  Synthetic
cgcccuccagcagaggcuc

SEQ ID NO: 1111 - RNA, 19 nt, Artificial Sequence
  Synthetic
cucccuuuuccccggcacc

SEQ ID NO: 1112 - RNA, 19 nt, Artificial Sequence
  Synthetic
ccaccucacucccuaccug

SEQ ID NO: 1113 - RNA, 19 nt, Artificial Sequence
  Synthetic
gagcaccucgcccuuggag

SEQ ID NO: 1114 - RNA, 19 nt, Artificial Sequence
  Synthetic
gcgggacggaggggcagcg

SEQ ID NO: 1115 - RNA, 19 nt, Artificial Sequence
  Synthetic
gcacagcccucuucugcag

SEQ ID NO: 1116 - RNA, 19 nt, Artificial Sequence
  Synthetic
gcacauggucuuacuggag

SEQ ID NO: 1117 - RNA, 19 nt, Artificial Sequence
  Synthetic
gcagccaccggcacaagca

SEQ ID NO: 1118 - RNA, 19 nt, Artificial Sequence
  Synthetic
accccucgucacaggccug

SEQ ID NO: 1119 - RNA, 19 nt, Artificial Sequence
  Synthetic
gggagcacugccccuccac

SEQ ID NO: 1120 - RNA, 19 nt, Artificial Sequence
  Synthetic
cgcacaguccuugguuggu

SEQ ID NO: 1121 - RNA, 19 nt, Artificial Sequence
  Synthetic
ugcagaccggguguccccc

SEQ ID NO: 1122 - RNA, 19 nt, Artificial Sequence
  Synthetic
cuccauccacaagcugcgg

SEQ ID NO: 1123 - RNA, 19 nt, Artificial Sequence
  Synthetic
gcagcaccgcccacugggg

SEQ ID NO: 1124 - RNA, 19 nt, Artificial Sequence
  Synthetic
gcggacccagucggccccg

SEQ ID NO: 1125 - RNA, 19 nt, Artificial Sequence
  Synthetic
gcugccccagaacgcccag

SEQ ID NO: 1126 - RNA, 19 nt, Artificial Sequence
  Synthetic
ggcucugcagcaccugguc

SEQ ID NO: 1127 - RNA, 19 nt, Artificial Sequence
  Synthetic
cauccagcagcagcaucag

SEQ ID NO: 1128 - RNA, 19 nt, Artificial Sequence
  Synthetic
gcaguuucuggagaaacac

SEQ ID NO: 1129 - RNA, 19 nt, Artificial Sequence
  Synthetic
caagcagcaguuccagcag

SEQ ID NO: 1130 - RNA, 19 nt, Artificial Sequence
  Synthetic
gcagcaacugcagaugaac

SEQ ID NO: 1131 - RNA, 19 nt, Artificial Sequence
  Synthetic
caagaucauccccaagcca

SEQ ID NO: 1132 - RNA, 19 nt, Artificial Sequence
  Synthetic
aagcgagccagcccggcag

SEQ ID NO: 1133 - RNA, 19 nt, Artificial Sequence
  Synthetic
gccggagagccacccggag

SEQ ID NO: 1134 - RNA, 19 nt, Artificial Sequence
  Synthetic
ggagacggaggaggagcuc

SEQ ID NO: 1135 - RNA, 19 nt, Artificial Sequence
  Synthetic
ccgugagcaccaggcucug

SEQ ID NO: 1136 - RNA, 19 nt, Artificial Sequence
  Synthetic
gcuggacgagcccuaccug

SEQ ID NO: 1137 - RNA, 19 nt, Artificial Sequence
  Synthetic
ggaccggcugccggggcag

SEQ ID NO: 1138 - RNA, 19 nt, Artificial Sequence
  Synthetic
gaaggaggcgcacgcacag

SEQ ID NO: 1139 - RNA, 19 nt, Artificial Sequence
  Synthetic
ggccggcgugcaggugaag

SEQ ID NO: 1140 - RNA, 19 nt, Artificial Sequence
  Synthetic
gcaggagcccauugagagc

SEQ ID NO: 1141 - RNA, 19 nt, Artificial Sequence
  Synthetic
cgaugaggaagaggcagag

SEQ ID NO: 1142 - RNA, 19 nt, Artificial Sequence
  Synthetic
gcccccacgggagguggag

SEQ ID NO: 1143 - RNA, 19 nt, Artificial Sequence
  Synthetic
gccgggccagcgccagccc

SEQ ID NO: 1144 - RNA, 19 nt, Artificial Sequence
  Synthetic
cagugagcaggagcugcuc

SEQ ID NO: 1145 - RNA, 19 nt, Artificial Sequence
  Synthetic
cuucagacagcaagcccuc

SEQ ID NO: 1146 - RNA, 19 nt, Artificial Sequence
  Synthetic
ccugcuggagcagcagcgg

SEQ ID NO: 1147 - RNA, 19 nt, Artificial Sequence
  Synthetic
gauccaccagcugaggaac

SEQ ID NO: 1148 - RNA, 19 nt, Artificial Sequence
  Synthetic
cuaccaggcguccauggag

SEQ ID NO: 1149 - RNA, 19 nt, Artificial Sequence
  Synthetic
ggccgccggcauccccgug

SEQ ID NO: 1150 - RNA, 19 nt, Artificial Sequence
  Synthetic
guccuucggcggccacagg

SEQ ID NO: 1151 - RNA, 19 nt, Artificial Sequence
  Synthetic
gccucugucccgggcgcag

SEQ ID NO: 1152 - RNA, 19 nt, Artificial Sequence
  Synthetic
guccucacccgcgucugcc

SEQ ID NO: 1153 - RNA, 19 nt, Artificial Sequence
  Synthetic
caccuuccccgugucugug

SEQ ID NO: 1154 - RNA, 19 nt, Artificial Sequence
  Synthetic
gcaggagccccccaccaag

SEQ ID NO: 1155 - RNA, 19 nt, Artificial Sequence
  Synthetic
gccgagguucacgacaggc

SEQ ID NO: 1156 - RNA, 19 nt, Artificial Sequence
  Synthetic
ccucguguaugacacgcug

SEQ ID NO: 1157 - RNA, 19 nt, Artificial Sequence
  Synthetic
gaugcugaagcaccagugc

SEQ ID NO: 1158 - RNA, 19 nt, Artificial Sequence
  Synthetic
caccugcgggaguagcagc

SEQ ID NO: 1159 - RNA, 19 nt, Artificial Sequence
  Synthetic
cagccaccccgagcacgcc

SEQ ID NO: 1160 - RNA, 19 nt, Artificial Sequence
  Synthetic
cgggaggauccagagcauc

SEQ ID NO: 1161 - RNA, 19 nt, Artificial Sequence
  Synthetic
cuggucccgccugcaggag

SEQ ID NO: 1162 - RNA, 19 nt, Artificial Sequence
  Synthetic
gacgggccuccggggcaaa

SEQ ID NO: 1163 - RNA, 19 nt, Artificial Sequence
  Synthetic
augcgagugcauccgcgga

SEQ ID NO: 1164 - RNA, 19 nt, Artificial Sequence
  Synthetic
acgcaaggccacccuggag

SEQ ID NO: 1165 - RNA, 19 nt, Artificial Sequence
  Synthetic
ggagcuacagacggugcac

SEQ ID NO: 1166 - RNA, 19 nt, Artificial Sequence
  Synthetic
cucggaagcccacacccuc

SEQ ID NO: 1167 - RNA, 19 nt, Artificial Sequence
  Synthetic
ccuguauggcacgaacccc

SEQ ID NO: 1168 - RNA, 19 nt, Artificial Sequence
  Synthetic
ccucaaccggcagaaacug

SEQ ID NO: 1169 - RNA, 19 nt, Artificial Sequence
  Synthetic
ggacaguaagaaacuucua

SEQ ID NO: 1170 - RNA, 19 nt, Artificial Sequence
  Synthetic
aggcucgcucgccuccgug

SEQ ID NO: 1171 - RNA, 19 nt, Artificial Sequence
  Synthetic
guucguccggcucccuugc

SEQ ID NO: 1172 - RNA, 19 nt, Artificial Sequence
  Synthetic
cggugguguugggguggac

SEQ ID NO: 1173 - RNA, 19 nt, Artificial Sequence
  Synthetic
cagugacaccauauggaac

SEQ ID NO: 1174 - RNA, 19 nt, Artificial Sequence
  Synthetic
cgaggugcacucggcgggg

SEQ ID NO: 1175 - RNA, 19 nt, Artificial Sequence
  Synthetic
ggcagcccgccuggcugug

SEQ ID NO: 1176 - RNA, 19 nt, Artificial Sequence
  Synthetic
gggcugcgugguagagcug

SEQ ID NO: 1177 - RNA, 19 nt, Artificial Sequence
  Synthetic
ggucuucaagguggccaca

SEQ ID NO: 1178 - RNA, 19 nt, Artificial Sequence
  Synthetic
aggggagcugaagaauggc

SEQ ID NO: 1179 - RNA, 19 nt, Artificial Sequence
  Synthetic
cuuugcugugguccgcccc

SEQ ID NO: 1180 - RNA, 19 nt, Artificial Sequence
  Synthetic
cccuggacaccaugcggag

SEQ ID NO: 1181 - RNA, 19 nt, Artificial Sequence
  Synthetic
ggagagcacgcccaugggc

SEQ ID NO: 1182 - RNA, 19 nt, Artificial Sequence
  Synthetic
cuuuugcuacuucaacucc

SEQ ID NO: 1183 - RNA, 19 nt, Artificial Sequence
  Synthetic
cguggccguggcagccaag

SEQ ID NO: 1184 - RNA, 19 nt, Artificial Sequence
  Synthetic
gcuucugcagcagagguug

SEQ ID NO: 1185 - RNA, 19 nt, Artificial Sequence
  Synthetic
gagcgugagcaagauccuc

SEQ ID NO: 1186 - RNA, 19 nt, Artificial Sequence
  Synthetic
caucguggacugggacgug

SEQ ID NO: 1187 - RNA, 19 nt, Artificial Sequence
  Synthetic
gcaccauggaaacgggacc

SEQ ID NO: 1188 - RNA, 19 nt, Artificial Sequence
  Synthetic
ccagcaggcuuucuacagc

SEQ ID NO: 1189 - RNA, 19 nt, Artificial Sequence
  Synthetic
cgacccuagcguccuguac

SEQ ID NO: 1190 - RNA, 19 nt, Artificial Sequence
  Synthetic
caugucccuccaccgcuac

SEQ ID NO: 1191 - RNA, 19 nt, Artificial Sequence
  Synthetic
cgacgaugggaacuucuuc

SEQ ID NO: 1192 - RNA, 19 nt, Artificial Sequence
  Synthetic
cccaggcagcggggcuccu

SEQ ID NO: 1193 - RNA, 19 nt, Artificial Sequence
  Synthetic
ugaugaggugggcacaggg

SEQ ID NO: 1194 - RNA, 19 nt, Artificial Sequence
  Synthetic
gcccggcguggguuucaac

SEQ ID NO: 1195 - RNA, 19 nt, Artificial Sequence
  Synthetic
cgucaacauggcuuucacc

SEQ ID NO: 1196 - RNA, 19 nt, Artificial Sequence
  Synthetic
cggcggccuggaccccccc

SEQ ID NO: 1197 - RNA, 19 nt, Artificial Sequence
  Synthetic
caugggagacgcugaguac

SEQ ID NO: 1198 - RNA, 19 nt, Artificial Sequence
  Synthetic
cuuggcggccuucagaacg

SEQ ID NO: 1199 - RNA, 19 nt, Artificial Sequence
  Synthetic
gguggucaugccgaucgcc

SEQ ID NO: 1200 - RNA, 19 nt, Artificial Sequence
  Synthetic
cagcgaguuugccccggau

SEQ ID NO: 1201 - RNA, 19 nt, Artificial Sequence
  Synthetic
uguggugcuggugucauca

SEQ ID NO: 1202 - RNA, 19 nt, Artificial Sequence
  Synthetic
aggcuucgaugccguggag

SEQ ID NO: 1203 - RNA, 19 nt, Artificial Sequence
  Synthetic
gggccaccccaccccucuu

SEQ ID NO: 1204 - RNA, 19 nt, Artificial Sequence
  Synthetic
ugggggcuacaaccucucc

SEQ ID NO: 1205 - RNA, 19 nt, Artificial Sequence
  Synthetic
cgccagaugcuucggguac

SEQ ID NO: 1206 - RNA, 19 nt, Artificial Sequence
  Synthetic
ccugacgaagcagcugaug

SEQ ID NO: 1207 - RNA, 19 nt, Artificial Sequence
  Synthetic
gggccuggcuggcggccgg

SEQ ID NO: 1208 - RNA, 19 nt, Artificial Sequence
  Synthetic
gauuguccuggcccucgag

SEQ ID NO: 1209 - RNA, 19 nt, Artificial Sequence
  Synthetic
gggaggccacgaccugacc

SEQ ID NO: 1210 - RNA, 19 nt, Artificial Sequence
  Synthetic
cgccauuugcgacgccucg

SEQ ID NO: 1211 - RNA, 19 nt, Artificial Sequence
  Synthetic
ggaagcauguguuucugcc

SEQ ID NO: 1212 - RNA, 19 nt, Artificial Sequence
  Synthetic
cuugcugggaaacgagcuu

SEQ ID NO: 1213 - RNA, 19 nt, Artificial Sequence
  Synthetic
ugauccucucccagaaaag

SEQ ID NO: 1214 - RNA, 19 nt, Artificial Sequence
  Synthetic
gguuuuacagcaaagaccc

SEQ ID NO: 1215 - RNA, 19 nt, Artificial Sequence
  Synthetic
caaugcaaacgcuguccgu

SEQ ID NO: 1216 - RNA, 19 nt, Artificial Sequence
  Synthetic
uuccauggagaaagucaug

SEQ ID NO: 1217 - RNA, 19 nt, Artificial Sequence
  Synthetic
ggagauccacagcaaguac

SEQ ID NO: 1218 - RNA, 19 nt, Artificial Sequence
  Synthetic
cuggcgcugccugcagcgc

SEQ ID NO: 1219 - RNA, 19 nt, Artificial Sequence
  Synthetic
cacaaccuccacagcgggg

SEQ ID NO: 1220 - RNA, 19 nt, Artificial Sequence
  Synthetic
gcguucucugaucgaggcu

SEQ ID NO: 1221 - RNA, 19 nt, Artificial Sequence
  Synthetic
ucagacuugcgagaacgaa

SEQ ID NO: 1222 - RNA, 19 nt, Artificial Sequence
  Synthetic
agaagccgagacggucacc

SEQ ID NO: 1223 - RNA, 19 nt, Artificial Sequence
  Synthetic
cgccauggccucgcugucc

SEQ ID NO: 1224 - RNA, 19 nt, Artificial Sequence
  Synthetic
cgugggcgugaagcccgcc

SEQ ID NO: 1225 - RNA, 19 nt, Artificial Sequence
  Synthetic
cgaaaagagaccagaugag

SEQ ID NO: 1226 - RNA, 19 nt, Artificial Sequence
  Synthetic
ggagcccauggaagaggag

SEQ ID NO: 1227 - RNA, 19 nt, Artificial Sequence
  Synthetic
gccgccccuguagcacucc

SEQ ID NO: 1228 - RNA, 19 nt, Artificial Sequence
  Synthetic
ccucgaagcugcuguucuc

SEQ ID NO: 1229 - RNA, 19 nt, Artificial Sequence
  Synthetic
cuugucugucugucucugu

SEQ ID NO: 1230 - RNA, 19 nt, Artificial Sequence
  Synthetic
ucuugaagcucagccaaga

SEQ ID NO: 1231 - RNA, 19 nt, Artificial Sequence
  Synthetic
aaacuuucccgugucacgc

SEQ ID NO: 1232 - RNA, 19 nt, Artificial Sequence
  Synthetic
ccugcgucccaccgugggg

SEQ ID NO: 1233 - RNA, 19 nt, Artificial Sequence
  Synthetic
gcucucuuggagcacccag

SEQ ID NO: 1234 - RNA, 19 nt, Artificial Sequence
  Synthetic
gggacacccagcgugcaac

SEQ ID NO: 1235 - RNA, 19 nt, Artificial Sequence
  Synthetic
cagccacgggaagccuuuc

SEQ ID NO: 1236 - RNA, 19 nt, Artificial Sequence
  Synthetic
cugccgcccaggcccacag

SEQ ID NO: 1237 - RNA, 19 nt, Artificial Sequence
  Synthetic
ggucucgagacgcacaugc

SEQ ID NO: 1238 - RNA, 19 nt, Artificial Sequence
  Synthetic
cacgccugggcguggcagc

SEQ ID NO: 1239 - RNA, 19 nt, Artificial Sequence
  Synthetic
ccucacagggaacacggga

SEQ ID NO: 1240 - RNA, 19 nt, Artificial Sequence
  Synthetic
acagacgccggcgacgcgc

SEQ ID NO: 1241 - RNA, 19 nt, Artificial Sequence
  Synthetic
cagacacacggacacgcgg

SEQ ID NO: 1242 - RNA, 19 nt, Artificial Sequence
  Synthetic
gaagccaagcacacucugg

SEQ ID NO: 1243 - RNA, 19 nt, Artificial Sequence
  Synthetic
gcgggucccgcaagggacg

SEQ ID NO: 1244 - RNA, 19 nt, Artificial Sequence
  Synthetic
gccguggaagaaaggagcc

SEQ ID NO: 1245 - RNA, 19 nt, Artificial Sequence
  Synthetic
cuguggcaacaggcggccg

SEQ ID NO: 1246 - RNA, 19 nt, Artificial Sequence
  Synthetic
gagcugccgaauucaguug

SEQ ID NO: 1247 - RNA, 19 nt, Artificial Sequence
  Synthetic
gacacgaggcacagaaaac

SEQ ID NO: 1248 - RNA, 19 nt, Artificial Sequence
  Synthetic
caaauaucaaagaucuaau

SEQ ID NO: 1249 - RNA, 19 nt, Artificial Sequence
  Synthetic
uaauacaaaacaaacuuga

SEQ ID NO: 1250 - RNA, 19 nt, Artificial Sequence
  Synthetic
auuaaaacuggugcuuaaa

SEQ ID NO: 1251 - RNA, 19 nt, Artificial Sequence
  Synthetic
aguuuauuacccacaacuc

SEQ ID NO: 1252 - RNA, 19 nt, Artificial Sequence
  Synthetic
ccacagucucuguguaaac

SEQ ID NO: 1253 - RNA, 19 nt, Artificial Sequence
  Synthetic
ccacucgacucaucuugua

SEQ ID NO: 1254 - RNA, 19 nt, Artificial Sequence
  Synthetic
agcuuauuuuuuuuuuaaa

SEQ ID NO: 1255 - RNA, 19 nt, Artificial Sequence
  Synthetic
agaggacguuuucuacggc

SEQ ID NO: 1256 - RNA, 19 nt, Artificial Sequence
  Synthetic
cuguggcccgccucuguga

SEQ ID NO: 1257 - RNA, 19 nt, Artificial Sequence
  Synthetic
aaccauagcggugugcggc

SEQ ID NO: 1258 - RNA, 19 nt, Artificial Sequence
  Synthetic
cggggggucugcacccggg

SEQ ID NO: 1259 - RNA, 19 nt, Artificial Sequence
  Synthetic
gugggggacagagggaccu

SEQ ID NO: 1260 - RNA, 19 nt, Artificial Sequence
  Synthetic
uuuaaagaaaacaaaacug

SEQ ID NO: 1261 - RNA, 19 nt, Artificial Sequence
  Synthetic
ggacagaaacaggaaugug

SEQ ID NO: 1262 - RNA, 19 nt, Artificial Sequence
  Synthetic
gagcugggggagcuggcuu

SEQ ID NO: 1263 - RNA, 19 nt, Artificial Sequence
  Synthetic
ugaguuucucaaaagccau

SEQ ID NO: 1264 - RNA, 19 nt, Artificial Sequence
  Synthetic
ucggaagaugcgaguuugu

SEQ ID NO: 1265 - RNA, 19 nt, Artificial Sequence
  Synthetic
ugccuuuuuuuuuauugcu

SEQ ID NO: 1266 - RNA, 19 nt, Artificial Sequence
  Synthetic
ucugguggauuuuuguggc

SEQ ID NO: 1267 - RNA, 19 nt, Artificial Sequence
  Synthetic
cuggguuuucugaagucug

SEQ ID NO: 1268 - RNA, 19 nt, Artificial Sequence
  Synthetic
gaggaacaaugccuuaaga

SEQ ID NO: 1269 - RNA, 19 nt, Artificial Sequence
  Synthetic
aaaaaacaaacagcaggaa

SEQ ID NO: 1270 - RNA, 19 nt, Artificial Sequence
  Synthetic
aucggugggacaguuuccu

SEQ ID NO: 1271 - RNA, 19 nt, Artificial Sequence
  Synthetic
uguggccagccgagccugg

SEQ ID NO: 1272 - RNA, 19 nt, Artificial Sequence
  Synthetic
gcagugcuggcaccgcgag

SEQ ID NO: 1273 - RNA, 19 nt, Artificial Sequence
  Synthetic
gcuggccugacgccucaag

SEQ ID NO: 1274 - RNA, 19 nt, Artificial Sequence
  Synthetic
gcacgggcaccagccguca

SEQ ID NO: 1275 - RNA, 19 nt, Artificial Sequence
  Synthetic
aucuccggggccaggggcu

SEQ ID NO: 1276 - RNA, 19 nt, Artificial Sequence
  Synthetic
ugcagcccggcggucccug

SEQ ID NO: 1277 - RNA, 19 nt, Artificial Sequence
  Synthetic
guuuugcuuuauugcuguu

SEQ ID NO: 1278 - RNA, 19 nt, Artificial Sequence
  Synthetic
uuaagaaaaauggagguag

SEQ ID NO: 1279 - RNA, 19 nt, Artificial Sequence
  Synthetic
guuccaaaaaaguggcaaa

SEQ ID NO: 1280 - RNA, 19 nt, Artificial Sequence
  Synthetic
aucccguuggagguuuuga

SEQ ID NO: 1281 - RNA, 19 nt, Artificial Sequence
  Synthetic
aaguccaacaaauuuuaaa

SEQ ID NO: 1282 - RNA, 19 nt, Artificial Sequence
  Synthetic
acgaauccaaaguguucuc

SEQ ID NO: 1283 - RNA, 19 nt, Artificial Sequence
  Synthetic
cacacgucacauacgauug

SEQ ID NO: 1284 - RNA, 19 nt, Artificial Sequence
  Synthetic
gagcaucuccaucuggucg

SEQ ID NO: 1285 - RNA, 19 nt, Artificial Sequence
  Synthetic
gugaagcaugugguaggca

SEQ ID NO: 1286 - RNA, 19 nt, Artificial Sequence
  Synthetic
acacuugcaguguuacgau

SEQ ID NO: 1287 - RNA, 19 nt, Artificial Sequence
  Synthetic
ucggaaugcuuuuuauuaa

SEQ ID NO: 1288 - RNA, 19 nt, Artificial Sequence
  Synthetic
aaagcaaguagcaugaagu

SEQ ID NO: 1289 - RNA, 19 nt, Artificial Sequence
  Synthetic
uauugcuuaaauuuuaggu

SEQ ID NO: 1290 - RNA, 19 nt, Artificial Sequence
  Synthetic
uauaaauaaauauauauau

SEQ ID NO: 1291 - RNA, 19 nt, Artificial Sequence
  Synthetic
uguauaauauauauuccaa

SEQ ID NO: 1292 - RNA, 19 nt, Artificial Sequence
  Synthetic
auguauuccaagcuaagaa

SEQ ID NO: 1293 - RNA, 19 nt, Artificial Sequence
  Synthetic
aacuuacuugauucuuaug

SEQ ID NO: 1294 - RNA, 19 nt, Artificial Sequence
  Synthetic
gaaaucuugauaaaauauu

SEQ ID NO: 1295 - RNA, 19 nt, Artificial Sequence
  Synthetic
uuauaaugcauuuauagaa

SEQ ID NO: 1296 - RNA, 19 nt, Artificial Sequence
  Synthetic
aaaaguauauauauauaua

SEQ ID NO: 1297 - RNA, 19 nt, Artificial Sequence
  Synthetic
auaaaaugaaugcagauug

SEQ ID NO: 1298 - RNA, 19 nt, Artificial Sequence
  Synthetic
gcgaaggucccugcaaaug

SEQ ID NO: 1299 - RNA, 19 nt, Artificial Sequence
  Synthetic
ggauggcuugugaauuugc

SEQ ID NO: 1300 - RNA, 19 nt, Artificial Sequence
  Synthetic
cucucaaggugcuuaugga

SEQ ID NO: 1301 - RNA, 19 nt, Artificial Sequence
  Synthetic
aaagggauccugauugauu

SEQ ID NO: 1302 - RNA, 19 nt, Artificial Sequence
  Synthetic
ugaaauucauguuuucuca

SEQ ID NO: 1303 - RNA, 19 nt, Artificial Sequence
  Synthetic
aagcuccagauuggcuaga

SEQ ID NO: 1304 - RNA, 19 nt, Artificial Sequence
  Synthetic
auuucagaucgccaacaca

SEQ ID NO: 1305 - RNA, 19 nt, Artificial Sequence
  Synthetic
auucgccacugggcaacua

SEQ ID NO: 1306 - RNA, 19 nt, Artificial Sequence
  Synthetic
acccuacaaguuuguacuu

SEQ ID NO: 1307 - RNA, 19 nt, Artificial Sequence
  Synthetic
uucauuuuaauuauuuucu

SEQ ID NO: 1308 - RNA, 19 nt, Artificial Sequence
  Synthetic
uaacagaaccgcucccguc

SEQ ID NO: 1309 - RNA, 19 nt, Artificial Sequence
  Synthetic
cuccaagccuucaugcaca

SEQ ID NO: 1310 - RNA, 19 nt, Artificial Sequence
  Synthetic
auauguaccuaaugaguuu

SEQ ID NO: 1311 - RNA, 19 nt, Artificial Sequence
  Synthetic
uuuauagcaaagaauauaa

SEQ ID NO: 1312 - RNA, 19 nt, Artificial Sequence
  Synthetic
aauuugcuguugauuuuug

SEQ ID NO: 1313 - RNA, 19 nt, Artificial Sequence
  Synthetic
guaugaauuuuuucacaaa

SEQ ID NO: 1314 - RNA, 19 nt, Artificial Sequence
  Synthetic
aaagauccugaauaagcau

SEQ ID NO: 1315 - RNA, 19 nt, Artificial Sequence
  Synthetic
uuguuuuaugaauuuuaca

SEQ ID NO: 1316 - RNA, 19 nt, Artificial Sequence
  Synthetic
auuuuuccucaccauuuag

SEQ ID NO: 1317 - RNA, 19 nt, Artificial Sequence
  Synthetic
gcaauuuucugaaugguaa

SEQ ID NO: 1318 - RNA, 19 nt, Artificial Sequence
  Synthetic
auaaugucuaaaucuuuuu

SEQ ID NO: 1319 - RNA, 19 nt, Artificial Sequence
  Synthetic
uccuuucugaauucuugcu

SEQ ID NO: 1320 - RNA, 19 nt, Artificial Sequence
  Synthetic
uuguacauuuuuuuuuacc

SEQ ID NO: 1321 - RNA, 19 nt, Artificial Sequence
  Synthetic
cuuucaaagguuuuuaauu

SEQ ID NO: 1322 - RNA, 19 nt, Artificial Sequence
  Synthetic
uauuuuuguuuuuauuuuu

SEQ ID NO: 1323 - RNA, 19 nt, Artificial Sequence
  Synthetic
uguacgaugaguuuucugc

SEQ ID NO: 1324 - RNA, 19 nt, Artificial Sequence
  Synthetic
cagcguacagaauuguugc

SEQ ID NO: 1325 - RNA, 19 nt, Artificial Sequence
  Synthetic
cugucagauucuauuuuca

SEQ ID NO: 1326 - RNA, 19 nt, Artificial Sequence
  Synthetic
agaaagugagaggagggac

SEQ ID NO: 1327 - RNA, 19 nt, Artificial Sequence
  Synthetic
ccguaggucuuuucggagu

SEQ ID NO: 1328 - RNA, 19 nt, Artificial Sequence
  Synthetic
ugacaccaacgauuguguc

SEQ ID NO: 1329 - RNA, 19 nt, Artificial Sequence
  Synthetic
cuuuccuggucuguccuag

SEQ ID NO: 1330 - RNA, 19 nt, Artificial Sequence
  Synthetic
ggagcuguauaaagaagcc

SEQ ID NO: 1331 - RNA, 19 nt, Artificial Sequence
  Synthetic
ccaggggcucuuuuuaacu

SEQ ID NO: 1332 - RNA, 19 nt, Artificial Sequence
  Synthetic
uuucaacacuaguaguauu

SEQ ID NO: 1333 - RNA, 19 nt, Artificial Sequence
  Synthetic
uacgaggggugguguguuu

SEQ ID NO: 1334 - RNA, 19 nt, Artificial Sequence
  Synthetic
uuuccccuccguggcaagg

SEQ ID NO: 1335 - RNA, 19 nt, Artificial Sequence
  Synthetic
ggcagggaggguugcuuag

SEQ ID NO: 1336 - RNA, 19 nt, Artificial Sequence
  Synthetic
ggaugcccggccacccugg

SEQ ID NO: 1337 - RNA, 19 nt, Artificial Sequence
  Synthetic
ggaggcuugccagaugccg

SEQ ID NO: 1338 - RNA, 19 nt, Artificial Sequence
  Synthetic
gggggcagucagcauuaau

SEQ ID NO: 1339 - RNA, 19 nt, Artificial Sequence
  Synthetic
ugaaacucauguuuaaacu

SEQ ID NO: 1340 - RNA, 19 nt, Artificial Sequence
  Synthetic
uucucugaccacaucguca

SEQ ID NO: 1341 - RNA, 19 nt, Artificial Sequence
  Synthetic
aggauagaauucuaacuug

SEQ ID NO: 1342 - RNA, 19 nt, Artificial Sequence
  Synthetic
gaguuuuccaaagaccuuu

SEQ ID NO: 1343 - RNA, 19 nt, Artificial Sequence
  Synthetic
uugagcaugucagcaaugc

SEQ ID NO: 1344 - RNA, 19 nt, Artificial Sequence
  Synthetic
cauggggcacacguggggc

SEQ ID NO: 1345 - RNA, 19 nt, Artificial Sequence
  Synthetic
cucuuuacccacuuggguu

SEQ ID NO: 1346 - RNA, 19 nt, Artificial Sequence
  Synthetic
uuuuccacugcagccacgu

SEQ ID NO: 1347 - RNA, 19 nt, Artificial Sequence
  Synthetic
uggccagcccuggauuuug

SEQ ID NO: 1348 - RNA, 19 nt, Artificial Sequence
  Synthetic
ggagccuguggcugcaagg

SEQ ID NO: 1349 - RNA, 19 nt, Artificial Sequence
  Synthetic
gaacccagggacccuuguu

SEQ ID NO: 1350 - RNA, 19 nt, Artificial Sequence
  Synthetic
ugccuggugaaccugcagg

SEQ ID NO: 1351 - RNA, 19 nt, Artificial Sequence
  Synthetic
ggaggguaugauugccuga

SEQ ID NO: 1352 - RNA, 19 nt, Artificial Sequence
  Synthetic
accaggacagccagucuuu

SEQ ID NO: 1353 - RNA, 19 nt, Artificial Sequence
  Synthetic
uacucuuuuucucuucaac

SEQ ID NO: 1354 - RNA, 19 nt, Artificial Sequence
  Synthetic
caguaacugacagucacgu

SEQ ID NO: 1355 - RNA, 19 nt, Artificial Sequence
  Synthetic
uuuuacugguaacuuauuu

SEQ ID NO: 1356 - RNA, 19 nt, Artificial Sequence
  Synthetic
uuccagcacaugaagccac

SEQ ID NO: 1357 - RNA, 19 nt, Artificial Sequence
  Synthetic
ccaguuucauuccaaagug

SEQ ID NO: 1358 - RNA, 19 nt, Artificial Sequence
  Synthetic
guauauuggguucagacuu

SEQ ID NO: 1359 - RNA, 19 nt, Artificial Sequence
  Synthetic
ugggggcagaaguucagac

SEQ ID NO: 1360 - RNA, 19 nt, Artificial Sequence
  Synthetic
cacaccgugcucaggaggg

SEQ ID NO: 1361 - RNA, 19 nt, Artificial Sequence
  Synthetic
gacccagagccgaguuucg

SEQ ID NO: 1362 - RNA, 19 nt, Artificial Sequence
  Synthetic
ggaguuugguaaaguuuac

SEQ ID NO: 1363 - RNA, 19 nt, Artificial Sequence
  Synthetic
caggguagcuucugaaauu

SEQ ID NO: 1364 - RNA, 19 nt, Artificial Sequence
  Synthetic
uaacucaaacuuuugacca

SEQ ID NO: 1365 - RNA, 19 nt, Artificial Sequence
  Synthetic
aaaugagugcagauucuug

SEQ ID NO: 1366 - RNA, 19 nt, Artificial Sequence
  Synthetic
ggauucacuuggucacugg

SEQ ID NO: 1367 - RNA, 19 nt, Artificial Sequence
  Synthetic
ggcugcugauggucagcuc

SEQ ID NO: 1368 - RNA, 19 nt, Artificial Sequence
  Synthetic
cugagacagugguuugaga

SEQ ID NO: 1369 - RNA, 19 nt, Artificial Sequence
  Synthetic
agcaggcagaacggucuug

SEQ ID NO: 1370 - RNA, 19 nt, Artificial Sequence
  Synthetic
gggacuuguuugacuuucc

SEQ ID NO: 1371 - RNA, 19 nt, Artificial Sequence
  Synthetic
cccucccugguggccacuc

SEQ ID NO: 1372 - RNA, 19 nt, Artificial Sequence
  Synthetic
cuuugcucugaagcccaga

SEQ ID NO: 1373 - RNA, 19 nt, Artificial Sequence
  Synthetic
auuggcaagaggagcuggu

SEQ ID NO: 1374 - RNA, 19 nt, Artificial Sequence
  Synthetic
uccauuccccauucauggc

SEQ ID NO: 1375 - RNA, 19 nt, Artificial Sequence
  Synthetic
cacagagcaguggcagggc

SEQ ID NO: 1376 - RNA, 19 nt, Artificial Sequence
  Synthetic
cccagcuagcaggcucuuc

SEQ ID NO: 1377 - RNA, 19 nt, Artificial Sequence
  Synthetic
cuggccuccuuggccucau

SEQ ID NO: 1378 - RNA, 19 nt, Artificial Sequence
  Synthetic
uucucugcauagcccucug

SEQ ID NO: 1379 - RNA, 19 nt, Artificial Sequence
  Synthetic
ggggauccugccaccugcc

SEQ ID NO: 1380 - RNA, 19 nt, Artificial Sequence
  Synthetic
ccucuuaccccgccguggc

SEQ ID NO: 1381 - RNA, 19 nt, Artificial Sequence
  Synthetic
cuuauggggaggaaugcau

SEQ ID NO: 1382 - RNA, 19 nt, Artificial Sequence
  Synthetic
ucaucucacuuuuuuuuuu

SEQ ID NO: 1383 - RNA, 19 nt, Artificial Sequence
  Synthetic
uuaagcagaugaugggaua

SEQ ID NO: 1384 - RNA, 19 nt, Artificial Sequence
  Synthetic
aacauggacugcucagugg

SEQ ID NO: 1385 - RNA, 19 nt, Artificial Sequence
  Synthetic
gccagguuaucaguggggg

SEQ ID NO: 1386 - RNA, 19 nt, Artificial Sequence
  Synthetic
ggacuuaauucuaaucuca

SEQ ID NO: 1387 - RNA, 19 nt, Artificial Sequence
  Synthetic
auucaaauggagacgcccu

SEQ ID NO: 1388 - RNA, 19 nt, Artificial Sequence
  Synthetic
ucugcaaaggccuggcagg

SEQ ID NO: 1389 - RNA, 19 nt, Artificial Sequence
  Synthetic
ggggaggcacguuucaucu

SEQ ID NO: 1390 - RNA, 19 nt, Artificial Sequence
  Synthetic
ugucagcucacuccagcuu

SEQ ID NO: 1391 - RNA, 19 nt, Artificial Sequence
  Synthetic
ucacaaaugugcugagagc

SEQ ID NO: 1392 - RNA, 19 nt, Artificial Sequence
  Synthetic
cauuacuguguagccuuuu

SEQ ID NO: 1393 - RNA, 19 nt, Artificial Sequence
  Synthetic
ucuuugaagacacacucgg

SEQ ID NO: 1394 - RNA, 19 nt, Artificial Sequence
  Synthetic
gcucuucuccacagcaagc

SEQ ID NO: 1395 - RNA, 19 nt, Artificial Sequence
  Synthetic
cguccagggcagauggcag

SEQ ID NO: 1396 - RNA, 19 nt, Artificial Sequence
  Synthetic
gaggaucugccucggcguc

SEQ ID NO: 1397 - RNA, 19 nt, Artificial Sequence
  Synthetic
cugcaggcgggaccacguc

SEQ ID NO: 1398 - RNA, 19 nt, Artificial Sequence
  Synthetic
cagggaggguuccuucaug

SEQ ID NO: 1399 - RNA, 19 nt, Artificial Sequence
  Synthetic
guguucucccugugggucc

SEQ ID NO: 1400 - RNA, 19 nt, Artificial Sequence
  Synthetic
cuuggaccuuuagccuuuu

SEQ ID NO: 1401 - RNA, 19 nt, Artificial Sequence
  Synthetic
uucuuccuuugcaaaggcc

SEQ ID NO: 1402 - RNA, 19 nt, Artificial Sequence
  Synthetic
cuugggggcacuggcuggg

SEQ ID NO: 1403 - RNA, 19 nt, Artificial Sequence
  Synthetic
gagucagcaagcgagcacu

SEQ ID NO: 1404 - RNA, 19 nt, Artificial Sequence
  Synthetic
uuuauaucccuuugaggga

SEQ ID NO: 1405 - RNA, 19 nt, Artificial Sequence
  Synthetic
aaacccugaugacgccacu

SEQ ID NO: 1406 - RNA, 19 nt, Artificial Sequence
  Synthetic
ugggccucuuggcgucugc

SEQ ID NO: 1407 - RNA, 19 nt, Artificial Sequence
  Synthetic
cccugcccucgcggcuucc

SEQ ID NO: 1408 - RNA, 19 nt, Artificial Sequence
  Synthetic
ccgccgugccgcagcgugc

SEQ ID NO: 1409 - RNA, 19 nt, Artificial Sequence
  Synthetic
cccacgugcccacgcccca

SEQ ID NO: 1410 - RNA, 19 nt, Artificial Sequence
  Synthetic
accagcaggcggcuguccc

SEQ ID NO: 1411 - RNA, 19 nt, Artificial Sequence
  Synthetic
cggaggccguggcccgcug

SEQ ID NO: 1412 - RNA, 19 nt, Artificial Sequence
  Synthetic
gggacuggccgccccuccc

SEQ ID NO: 1413 - RNA, 19 nt, Artificial Sequence
  Synthetic
ccagcgucccagggcucug

SEQ ID NO: 1414 - RNA, 19 nt, Artificial Sequence
  Synthetic
gguucuggagggccacuuu

SEQ ID NO: 1415 - RNA, 19 nt, Artificial Sequence
  Synthetic
ugucaagguguuucaguuu

SEQ ID NO: 1416 - RNA, 19 nt, Artificial Sequence
  Synthetic
uuucuuuacuucuuuugaa

SEQ ID NO: 1417 - RNA, 19 nt, Artificial Sequence
  Synthetic
aaaucuguuugcaagggga

SEQ ID NO: 1418 - RNA, 19 nt, Artificial Sequence
  Synthetic
aaggaccauuucguaaugg

SEQ ID NO: 1419 - RNA, 19 nt, Artificial Sequence
  Synthetic
gucugacacaaaagcaagu

SEQ ID NO: 1420 - RNA, 19 nt, Artificial Sequence
  Synthetic
uuugauuuuugcagcacua

SEQ ID NO: 1421 - RNA, 19 nt, Artificial Sequence
  Synthetic
agcaauggacuuuguuguu

SEQ ID NO: 1422 - RNA, 19 nt, Artificial Sequence
  Synthetic
uuuucuuuuugaucagaac

SEQ ID NO: 1423 - RNA, 19 nt, Artificial Sequence
  Synthetic
cauuccuucuuuacugguc

SEQ ID NO: 1424 - RNA, 19 nt, Artificial Sequence
  Synthetic
cacagccacgugcucauuc

SEQ ID NO: 1425 - RNA, 19 nt, Artificial Sequence
  Synthetic
ccauucuucuuuuuguaga

SEQ ID NO: 1426 - RNA, 19 nt, Artificial Sequence
  Synthetic
acuuugggcccacguguuu

SEQ ID NO: 1427 - RNA, 19 nt, Artificial Sequence
  Synthetic
uuaugggcauugauacaua

SEQ ID NO: 1428 - RNA, 19 nt, Artificial Sequence
  Synthetic
auauaaauauauagauaua

SEQ ID NO: 1429 - RNA, 19 nt, Artificial Sequence
  Synthetic
aaauauauaugaauauauu

SEQ ID NO: 1430 - RNA, 19 nt, Artificial Sequence
  Synthetic
uuuuuuaaguuuccuacac

SEQ ID NO: 1431 - RNA, 19 nt, Artificial Sequence
  Synthetic
ccuggagguugcauggacu

SEQ ID NO: 1432 - RNA, 19 nt, Artificial Sequence
  Synthetic
uguacgaccggcaugacuu

SEQ ID NO: 1433 - RNA, 19 nt, Artificial Sequence
  Synthetic
uuauauuguauacagauuu

SEQ ID NO: 1434 - RNA, 19 nt, Artificial Sequence
  Synthetic
uugcacgccaaacucggca

SEQ ID NO: 1435 - RNA, 19 nt, Artificial Sequence
  Synthetic
agcuuuggggaagaagaaa

SEQ ID NO: 1436 - RNA, 19 nt, Artificial Sequence
  Synthetic
aaaugccuuucuguucccc

SEQ ID NO: 1437 - RNA, 19 nt, Artificial Sequence
  Synthetic
cucucaugacauuugcaga

SEQ ID NO: 1438 - RNA, 19 nt, Artificial Sequence
  Synthetic
auacaaaagauggaaauuu

SEQ ID NO: 1439 - RNA, 19 nt, Artificial Sequence
  Synthetic
uuucuguaaaacaaaaccu

SEQ ID NO: 1440 - RNA, 19 nt, Artificial Sequence
  Synthetic
uugaaggagaggagggcgg

SEQ ID NO: 1441 - RNA, 19 nt, Artificial Sequence
  Synthetic
gggaaguuugcgucuuauu

SEQ ID NO: 1442 - RNA, 19 nt, Artificial Sequence
  Synthetic
ugaacuuauucuuaagaaa

SEQ ID NO: 1443 - RNA, 19 nt, Artificial Sequence
  Synthetic
auuguacuuuuuauuguaa

SEQ ID NO: 1444 - RNA, 19 nt, Artificial Sequence
  Synthetic
agaaaaauaaaaaggacua

SEQ ID NO: 1445 - RNA, 19 nt, Artificial Sequence
  Synthetic
acuuaaacauuugucauau

SEQ ID NO: 1446 - RNA, 19 nt, Artificial Sequence
  Synthetic
uuaagaaaaaaaguuuauc

SEQ ID NO: 1447 - RNA, 19 nt, Artificial Sequence
  Synthetic
cuagcacuugugacauacc

SEQ ID NO: 1448 - RNA, 19 nt, Artificial Sequence
  Synthetic
caauaauagaguuuauugu

SEQ ID NO: 1449 - RNA, 19 nt, Artificial Sequence
  Synthetic
uauuuauguggaaacagug

SEQ ID NO: 1450 - RNA, 19 nt, Artificial Sequence
  Synthetic
guuuuagggaaacuacuca

SEQ ID NO: 1451 - RNA, 19 nt, Artificial Sequence
  Synthetic
agaauucacagugaacugc

SEQ ID NO: 1452 - RNA, 19 nt, Artificial Sequence
  Synthetic
ccugucucucucgaguuga

SEQ ID NO: 1453 - RNA, 19 nt, Artificial Sequence
  Synthetic
auuuggaggaauuuuguuu

SEQ ID NO: 1454 - RNA, 19 nt, Artificial Sequence
  Synthetic
uuguuuuguuuuguuuguu

SEQ ID NO: 1455 - RNA, 19 nt, Artificial Sequence
  Synthetic
uuccuuuuaucuccuucca

SEQ ID NO: 1456 - RNA, 19 nt, Artificial Sequence
  Synthetic
acgggccaggcgagcgccg

SEQ ID NO: 1457 - RNA, 19 nt, Artificial Sequence
  Synthetic
gcccgcccucacuggccuu

SEQ ID NO: 1458 - RNA, 19 nt, Artificial Sequence
  Synthetic
ugugacgguuuauucugau

SEQ ID NO: 1459 - RNA, 19 nt, Artificial Sequence
  Synthetic
uugagaacugggcggacuc

SEQ ID NO: 1460 - RNA, 19 nt, Artificial Sequence
  Synthetic
cgaaagaguccccuuuucc

SEQ ID NO: 1461 - RNA, 19 nt, Artificial Sequence
  Synthetic
cgcacagcuguguugacuu

SEQ ID NO: 1462 - RNA, 19 nt, Artificial Sequence
  Synthetic
uuuuaauuacuuuuaggug

SEQ ID NO: 1463 - RNA, 19 nt, Artificial Sequence
  Synthetic
gauguauggcuaagauuuc

SEQ ID NO: 1464 - RNA, 19 nt, Artificial Sequence
  Synthetic
cacuuuaagcagucgugaa

SEQ ID NO: 1465 - RNA, 19 nt, Artificial Sequence
  Synthetic
acugugcgagcacuguggu

SEQ ID NO: 1466 - RNA, 19 nt, Artificial Sequence
  Synthetic
uuuacaauuauacuuugca

SEQ ID NO: 1467 - RNA, 19 nt, Artificial Sequence
  Synthetic
aucgaaaggaaaccauuuc

SEQ ID NO: 1468 - RNA, 19 nt, Artificial Sequence
  Synthetic
cuucauuguaacgaagcug

SEQ ID NO: 1469 - RNA, 19 nt, Artificial Sequence
  Synthetic
gagcguguucuuagcucgg

SEQ ID NO: 1470 - RNA, 19 nt, Artificial Sequence
  Synthetic
gccucacuuugucucuggc

SEQ ID NO: 1471 - RNA, 19 nt, Artificial Sequence
  Synthetic
cauugauuaaaagucugcu

SEQ ID NO: 1472 - RNA, 19 nt, Artificial Sequence
  Synthetic
ggcggcggccccacaaccu

SEQ ID NO: 1473 - RNA, 19 nt, Artificial Sequence
  Synthetic
gcggggacggugcuccgcg

SEQ ID NO: 1474 - RNA, 19 nt, Artificial Sequence
  Synthetic
gcucgggcucgggcggcgg

SEQ ID NO: 1475 - RNA, 19 nt, Artificial Sequence
  Synthetic
gcgggugcgcgggcucggg

SEQ ID NO: 1476 - RNA, 19 nt, Artificial Sequence
  Synthetic
gcggcggcggcggcgcggg

SEQ ID NO: 1477 - RNA, 19 nt, Artificial Sequence
  Synthetic
ugggaggcuguucgggcgg

SEQ ID NO: 1478 - RNA, 19 nt, Artificial Sequence
  Synthetic
gccgccgggggcccaggcu

SEQ ID NO: 1479 - RNA, 19 nt, Artificial Sequence
  Synthetic
ccgggacgcggccacggcg

SEQ ID NO: 1480 - RNA, 19 nt, Artificial Sequence
  Synthetic
gggcucgggcggcgacagc

SEQ ID NO: 1481 - RNA, 19 nt, Artificial Sequence
  Synthetic
ccgccggcgcgcgggcucg

SEQ ID NO: 1482 - RNA, 19 nt, Artificial Sequence
  Synthetic
cucagccugcgccgccacc

SEQ ID NO: 1483 - RNA, 19 nt, Artificial Sequence
  Synthetic
cgcuccgcgccgcaucucc

SEQ ID NO: 1484 - RNA, 19 nt, Artificial Sequence
  Synthetic
gcucuagcccugcuccggc

SEQ ID NO: 1485 - RNA, 19 nt, Artificial Sequence
  Synthetic
ggcgggcggcggcggccgg

SEQ ID NO: 1486 - RNA, 19 nt, Artificial Sequence
  Synthetic
cggggcugcgcuuaccgcg

SEQ ID NO: 1487 - RNA, 19 nt, Artificial Sequence
  Synthetic
ggcccgcgggcgccgggcc

SEQ ID NO: 1488 - RNA, 19 nt, Artificial Sequence
  Synthetic
gggcgggcggcggacaaug

SEQ ID NO: 1489 - RNA, 19 nt, Artificial Sequence
  Synthetic
caggcugcgcggggcgcgg

SEQ ID NO: 1490 - RNA, 19 nt, Artificial Sequence
  Synthetic
cgcgggcuccaaggccugc

SEQ ID NO: 1491 - RNA, 19 nt, Artificial Sequence
  Synthetic
ccggcggcguccaccugcc

SEQ ID NO: 1492 - RNA, 19 nt, Artificial Sequence
  Synthetic
gcgcggggcggguguggac

SEQ ID NO: 1493 - RNA, 19 nt, Artificial Sequence
  Synthetic
cccgccucccacggccgcg

SEQ ID NO: 1494 - RNA, 19 nt, Artificial Sequence
  Synthetic
gcgcggccagcgcuggccc

SEQ ID NO: 1495 - RNA, 19 nt, Artificial Sequence
  Synthetic
accggcgggucccacggcg

SEQ ID NO: 1496 - RNA, 19 nt, Artificial Sequence
  Synthetic
ggccgggcggcccugggga

SEQ ID NO: 1497 - RNA, 19 nt, Artificial Sequence
  Synthetic
guggaaagguccagaaggg

SEQ ID NO: 1498 - RNA, 19 nt, Artificial Sequence
  Synthetic
agccgccucgcggcgcggg

SEQ ID NO: 1499 - RNA, 19 nt, Artificial Sequence
  Synthetic
ccccgccccggcgggcgaa

SEQ ID NO: 1500 - RNA, 19 nt, Artificial Sequence
  Synthetic
ccgugcccacccccgcgcc

SEQ ID NO: 1501 - RNA, 19 nt, Artificial Sequence
  Synthetic
agacggcgccgcugccugc

SEQ ID NO: 1502 - RNA, 19 nt, Artificial Sequence
  Synthetic
cgcgggccccgcaccggga

SEQ ID NO: 1503 - RNA, 19 nt, Artificial Sequence
  Synthetic
augaaccugcucggggggc

SEQ ID NO: 1504 - RNA, 19 nt, Artificial Sequence
  Synthetic
guccgcuggcuucugcaga

SEQ ID NO: 1505 - RNA, 19 nt, Artificial Sequence
  Synthetic
cacaaguugaacagaggcg

SEQ ID NO: 1506 - RNA, 19 nt, Artificial Sequence
  Synthetic
cucaugagccagguaaccc

SEQ ID NO: 1507 - RNA, 19 nt, Artificial Sequence
  Synthetic
gagccucgccggcaagguc

SEQ ID NO: 1508 - RNA, 19 nt, Artificial Sequence
  Synthetic
cacagacguucaagcgccg

SEQ ID NO: 1509 - RNA, 19 nt, Artificial Sequence
  Synthetic
ggacggugagggcuggguc

SEQ ID NO: 1510 - RNA, 19 nt, Artificial Sequence
  Synthetic
caacacauacaaguaccgg

SEQ ID NO: 1511 - RNA, 19 nt, Artificial Sequence
  Synthetic
cgagcuccaaacucccacc

SEQ ID NO: 1512 - RNA, 19 nt, Artificial Sequence
  Synthetic
cggaaacgauagcuccaac

SEQ ID NO: 1513 - RNA, 19 nt, Artificial Sequence
  Synthetic
aauggcucaaaauuuccac

SEQ ID NO: 1514 - RNA, 19 nt, Artificial Sequence
  Synthetic
cuccuuuaagugauucgaa

SEQ ID NO: 1515 - RNA, 19 nt, Artificial Sequence
  Synthetic
cauugcuagcaauguccac

SEQ ID NO: 1516 - RNA, 19 nt, Artificial Sequence
  Synthetic
uggauggcuuugggagcuc

SEQ ID NO: 1517 - RNA, 19 nt, Artificial Sequence
  Synthetic
ucggccagaaaguccaucu

SEQ ID NO: 1518 - RNA, 19 nt, Artificial Sequence
  Synthetic
cagcuccacuggcuggucu

SEQ ID NO: 1519 - RNA, 19 nt, Artificial Sequence
  Synthetic
cacgcgggcaggauucagc

SEQ ID NO: 1520 - RNA, 19 nt, Artificial Sequence
  Synthetic
cgugcugggcaugugguuc

SEQ ID NO: 1521 - RNA, 19 nt, Artificial Sequence
  Synthetic
cgccguggccacauccacc

SEQ ID NO: 1522 - RNA, 19 nt, Artificial Sequence
  Synthetic
ggccacuugcagaggcagc

SEQ ID NO: 1523 - RNA, 19 nt, Artificial Sequence
  Synthetic
caugggcacugccgagggg

SEQ ID NO: 1524 - RNA, 19 nt, Artificial Sequence
  Synthetic
gugguccaggcgcaggucc

SEQ ID NO: 1525 - RNA, 19 nt, Artificial Sequence
  Synthetic
cacaggcagugagaacugg

SEQ ID NO: 1526 - RNA, 19 nt, Artificial Sequence
  Synthetic
ccgcagggccggcucugcc

SEQ ID NO: 1527 - RNA, 19 nt, Artificial Sequence
  Synthetic
cugcugcagcugcugcucc

SEQ ID NO: 1528 - RNA, 19 nt, Artificial Sequence
  Synthetic
cuugagcgccaggagcucc

SEQ ID NO: 1529 - RNA, 19 nt, Artificial Sequence
  Synthetic
cuggaucugcugcuucugc

SEQ ID NO: 1530 - RNA, 19 nt, Artificial Sequence
  Synthetic
agcgaugaggaucugccuc

SEQ ID NO: 1531 - RNA, 19 nt, Artificial Sequence
  Synthetic
gugcugccucuggaacuca

SEQ ID NO: 1532 - RNA, 19 nt, Artificial Sequence
  Synthetic
cugccgggagagcugcucg

SEQ ID NO: 1533 - RNA, 19 nt, Artificial Sequence
  Synthetic
guggagcugcgccucgugc

SEQ ID NO: 1534 - RNA, 19 nt, Artificial Sequence
  Synthetic
uuguugcuugaugugcucg

SEQ ID NO: 1535 - RNA, 19 nt, Artificial Sequence
  Synthetic
cauggccagcaucuccugu

SEQ ID NO: 1536 - RNA, 19 nt, Artificial Sequence
  Synthetic
cagcuccugcuggugcuuc

SEQ ID NO: 1537 - RNA, 19 nt, Artificial Sequence
  Synthetic
cuuccgcugguguuccagc

SEQ ID NO: 1538 - RNA, 19 nt, Artificial Sequence
  Synthetic
cuggcggugccucuccagc

SEQ ID NO: 1539 - RNA, 19 nt, Artificial Sequence
  Synthetic
cuucuccagcuccugcucc

SEQ ID NO: 1540 - RNA, 19 nt, Artificial Sequence
  Synthetic
cuucugcucccggugcugc

SEQ ID NO: 1541 - RNA, 19 nt, Artificial Sequence
  Synthetic
guucuugagcugcugcagc

SEQ ID NO: 1542 - RNA, 19 nt, Artificial Sequence
  Synthetic
cucuuugcccuucuccuug

SEQ ID NO: 1543 - RNA, 19 nt, Artificial Sequence
  Synthetic
ugugcuggccacggcacuc

SEQ ID NO: 1544 - RNA, 19 nt, Artificial Sequence
  Synthetic
uaacuucaucuucacuucu

SEQ ID NO: 1545 - RNA, 19 nt, Artificial Sequence
  Synthetic
auugaggacaaauucuugu

SEQ ID NO: 1546 - RNA, 19 nt, Artificial Sequence
  Synthetic
ggccagcgccuucuuuuua

SEQ ID NO: 1547 - RNA, 19 nt, Artificial Sequence
  Synthetic
gugguucagauuccggugg

SEQ ID NO: 1548 - RNA, 19 nt, Artificial Sequence
  Synthetic
agggucgcuggaaaugcag

SEQ ID NO: 1549 - RNA, 19 nt, Artificial Sequence
  Synthetic
uuucccguaccaguagcga

SEQ ID NO: 1550 - RNA, 19 nt, Artificial Sequence
  Synthetic
aagggaacugugcugcguu

SEQ ID NO: 1551 - RNA, 19 nt, Artificial Sequence
  Synthetic
ggguggagaacucugguca

SEQ ID NO: 1552 - RNA, 19 nt, Artificial Sequence
  Synthetic
ggucgacacuccgcucugg

SEQ ID NO: 1553 - RNA, 19 nt, Artificial Sequence
  Synthetic
gaccgggugguuauaggag

SEQ ID NO: 1554 - RNA, 19 nt, Artificial Sequence
  Synthetic
ggcgucguacauucccagg

SEQ ID NO: 1555 - RNA, 19 nt, Artificial Sequence
  Synthetic
aagagggaagucaucuuug

SEQ ID NO: 1556 - RNA, 19 nt, Artificial Sequence
  Synthetic
uucagaagcuguuuuccua

SEQ ID NO: 1557 - RNA, 19 nt, Artificial Sequence
  Synthetic
ccguaauuucagauucggu

SEQ ID NO: 1558 - RNA, 19 nt, Artificial Sequence
  Synthetic
uuucugcuuuagccuggac

SEQ ID NO: 1559 - RNA, 19 nt, Artificial Sequence
  Synthetic
gcuccgucuuucggccacu

SEQ ID NO: 1560 - RNA, 19 nt, Artificial Sequence
  Synthetic
ccugcguaacagggggcug

SEQ ID NO: 1561 - RNA, 19 nt, Artificial Sequence
  Synthetic
gaccacuggcccgucuuuc

SEQ ID NO: 1562 - RNA, 19 nt, Artificial Sequence
  Synthetic
acgcuuuuuuagagcagug

SEQ ID NO: 1563 - RNA, 19 nt, Artificial Sequence
  Synthetic
gucugugacauccaacgga

SEQ ID NO: 1564 - RNA, 19 nt, Artificial Sequence
  Synthetic
ggcgcugcugcacgcggag

SEQ ID NO: 1565 - RNA, 19 nt, Artificial Sequence
  Synthetic
gcuggguccggagccuggg

SEQ ID NO: 1566 - RNA, 19 nt, Artificial Sequence
  Synthetic
ggagcuguuguugggugag

SEQ ID NO: 1567 - RNA, 19 nt, Artificial Sequence
  Synthetic
cuccgcgcugacgcucccg

SEQ ID NO: 1568 - RNA, 19 nt, Artificial Sequence
  Synthetic
ggcgggcgcgauaccguuc

SEQ ID NO: 1569 - RNA, 19 nt, Artificial Sequence
  Synthetic
cgccgggaugcuggggacg

SEQ ID NO: 1570 - RNA, 19 nt, Artificial Sequence
  Synthetic
gugcgccaaacucgucucc

SEQ ID NO: 1571 - RNA, 19 nt, Artificial Sequence
  Synthetic
uucucgugccacaagucug

SEQ ID NO: 1572 - RNA, 19 nt, Artificial Sequence
  Synthetic
aaguggagcggccgagccu

SEQ ID NO: 1573 - RNA, 19 nt, Artificial Sequence
  Synthetic
uggcgauguguagagggga

SEQ ID NO: 1574 - RNA, 19 nt, Artificial Sequence
  Synthetic
cgugauguugggcaaggau

SEQ ID NO: 1575 - RNA, 19 nt, Artificial Sequence
  Synthetic
gguggcaggcaggcccagc

SEQ ID NO: 1576 - RNA, 19 nt, Artificial Sequence
  Synthetic
cgugcccgcagaggggccg

SEQ ID NO: 1577 - RNA, 19 nt, Artificial Sequence
  Synthetic
gguguccugcuggcccgcc

SEQ ID NO: 1578 - RNA, 19 nt, Artificial Sequence
  Synthetic
gggaagggugagucucucg

SEQ ID NO: 1579 - RNA, 19 nt, Artificial Sequence
  Synthetic
gagccucugcuggagggcg

SEQ ID NO: 1580 - RNA, 19 nt, Artificial Sequence
  Synthetic
ggugccggggaaaagggag

SEQ ID NO: 1581 - RNA, 19 nt, Artificial Sequence
  Synthetic
cagguagggagugaggugg

SEQ ID NO: 1582 - RNA, 19 nt, Artificial Sequence
  Synthetic
cuccaagggcgaggugcuc

SEQ ID NO: 1583 - RNA, 19 nt, Artificial Sequence
  Synthetic
cgcugccccuccgucccgc

SEQ ID NO: 1584 - RNA, 19 nt, Artificial Sequence
  Synthetic
cugcagaagagggcugugc

SEQ ID NO: 1585 - RNA, 19 nt, Artificial Sequence
  Synthetic
cuccaguaagaccaugugc

SEQ ID NO: 1586 - RNA, 19 nt, Artificial Sequence
  Synthetic
ugcuugugccgguggcugc

SEQ ID NO: 1587 - RNA, 19 nt, Artificial Sequence
  Synthetic
caggccugugacgaggggu

SEQ ID NO: 1588 - RNA, 19 nt, Artificial Sequence
  Synthetic
guggaggggcagugcuccc

SEQ ID NO: 1589 - RNA, 19 nt, Artificial Sequence
  Synthetic
accaaccaaggacugugcg

SEQ ID NO: 1590 - RNA, 19 nt, Artificial Sequence
  Synthetic
gggggacacccggucugca

SEQ ID NO: 1591 - RNA, 19 nt, Artificial Sequence
  Synthetic
ccgcagcuuguggauggag

SEQ ID NO: 1592 - RNA, 19 nt, Artificial Sequence
  Synthetic
ccccagugggcggugcugc

SEQ ID NO: 1593 - RNA, 19 nt, Artificial Sequence
  Synthetic
cggggccgacuggguccgc

SEQ ID NO: 1594 - RNA, 19 nt, Artificial Sequence
  Synthetic
cugggcguucuggggcagc

SEQ ID NO: 1595 - RNA, 19 nt, Artificial Sequence
  Synthetic
gaccaggugcugcagagcc

SEQ ID NO: 1596 - RNA, 19 nt, Artificial Sequence
  Synthetic
cugaugcugcugcuggaug

SEQ ID NO: 1597 - RNA, 19 nt, Artificial Sequence
  Synthetic
guguuucuccagaaacugc

SEQ ID NO: 1598 - RNA, 19 nt, Artificial Sequence
  Synthetic
cugcuggaacugcugcuug

SEQ ID NO: 1599 - RNA, 19 nt, Artificial Sequence
  Synthetic
guucaucugcaguugcugc

SEQ ID NO: 1600 - RNA, 19 nt, Artificial Sequence
  Synthetic
uggcuuggggaugaucuug

SEQ ID NO: 1601 - RNA, 19 nt, Artificial Sequence
  Synthetic
cugccgggcuggcucgcuu

SEQ ID NO: 1602 - RNA, 19 nt, Artificial Sequence
  Synthetic
cuccggguggcucuccggc

SEQ ID NO: 1603 - RNA, 19 nt, Artificial Sequence
  Synthetic
gagcuccuccuccgucucc

SEQ ID NO: 1604 - RNA, 19 nt, Artificial Sequence
  Synthetic
cagagccuggugcucacgg

SEQ ID NO: 1605 - RNA, 19 nt, Artificial Sequence
  Synthetic
cagguagggcucguccagc

SEQ ID NO: 1606 - RNA, 19 nt, Artificial Sequence
  Synthetic
cugccccggcagccggucc

SEQ ID NO: 1607 - RNA, 19 nt, Artificial Sequence
  Synthetic
cugugcgugcgccuccuuc

SEQ ID NO: 1608 - RNA, 19 nt, Artificial Sequence
  Synthetic
cuucaccugcacgccggcc

SEQ ID NO: 1609 - RNA, 19 nt, Artificial Sequence
  Synthetic
gcucucaaugggcuccugc

SEQ ID NO: 1610 - RNA, 19 nt, Artificial Sequence
  Synthetic
cucugccucuuccucaucg

SEQ ID NO: 1611 - RNA, 19 nt, Artificial Sequence
  Synthetic
cuccaccucccgugggggc

SEQ ID NO: 1612 - RNA, 19 nt, Artificial Sequence
  Synthetic
gggcuggcgcuggcccggc

SEQ ID NO: 1613 - RNA, 19 nt, Artificial Sequence
  Synthetic
gagcagcuccugcucacug

SEQ ID NO: 1614 - RNA, 19 nt, Artificial Sequence
  Synthetic
gagggcuugcugucugaag

SEQ ID NO: 1615 - RNA, 19 nt, Artificial Sequence
  Synthetic
ccgcugcugcuccagcagg

SEQ ID NO: 1616 - RNA, 19 nt, Artificial Sequence
  Synthetic
guuccucagcugguggauc

SEQ ID NO: 1617 - RNA, 19 nt, Artificial Sequence
  Synthetic
cuccauggacgccugguag

SEQ ID NO: 1618 - RNA, 19 nt, Artificial Sequence
  Synthetic
cacggggaugccggcggcc

SEQ ID NO: 1619 - RNA, 19 nt, Artificial Sequence
  Synthetic
ccuguggccgccgaaggac

SEQ ID NO: 1620 - RNA, 19 nt, Artificial Sequence
  Synthetic
cugcgcccgggacagaggc

SEQ ID NO: 1621 - RNA, 19 nt, Artificial Sequence
  Synthetic
ggcagacgcgggugaggac

SEQ ID NO: 1622 - RNA, 19 nt, Artificial Sequence
  Synthetic
cacagacacggggaaggug

SEQ ID NO: 1623 - RNA, 19 nt, Artificial Sequence
  Synthetic
cuugguggggggcuccugc

SEQ ID NO: 1624 - RNA, 19 nt, Artificial Sequence
  Synthetic
gccugucgugaaccucggc

SEQ ID NO: 1625 - RNA, 19 nt, Artificial Sequence
  Synthetic
cagcgugucauacacgagg

SEQ ID NO: 1626 - RNA, 19 nt, Artificial Sequence
  Synthetic
gcacuggugcuucagcauc

SEQ ID NO: 1627 - RNA, 19 nt, Artificial Sequence
  Synthetic
gcugcuacucccgcaggug

SEQ ID NO: 1628 - RNA, 19 nt, Artificial Sequence
  Synthetic
ggcgugcucgggguggcug

SEQ ID NO: 1629 - RNA, 19 nt, Artificial Sequence
  Synthetic
gaugcucuggauccucccg

SEQ ID NO: 1630 - RNA, 19 nt, Artificial Sequence
  Synthetic
cuccugcaggcgggaccag

SEQ ID NO: 1631 - RNA, 19 nt, Artificial Sequence
  Synthetic
uuugccccggaggcccguc

SEQ ID NO: 1632 - RNA, 19 nt, Artificial Sequence
  Synthetic
uccgcggaugcacucgcau

SEQ ID NO: 1633 - RNA, 19 nt, Artificial Sequence
  Synthetic
cuccaggguggccuugcgu

SEQ ID NO: 1634 - RNA, 19 nt, Artificial Sequence
  Synthetic
gugcaccgucuguagcucc

SEQ ID NO: 1635 - RNA, 19 nt, Artificial Sequence
  Synthetic
gagggugugggcuuccgag

SEQ ID NO: 1636 - RNA, 19 nt, Artificial Sequence
  Synthetic
gggguucgugccauacagg

SEQ ID NO: 1637 - RNA, 19 nt, Artificial Sequence
  Synthetic
caguuucugccgguugagg

SEQ ID NO: 1638 - RNA, 19 nt, Artificial Sequence
  Synthetic
uagaaguuucuuacugucc

SEQ ID NO: 1639 - RNA, 19 nt, Artificial Sequence
  Synthetic
cacggaggcgagcgagccu

SEQ ID NO: 1640 - RNA, 19 nt, Artificial Sequence
  Synthetic
gcaagggagccggacgaac

SEQ ID NO: 1641 - RNA, 19 nt, Artificial Sequence
  Synthetic
guccaccccaacaccaccg

SEQ ID NO: 1642 - RNA, 19 nt, Artificial Sequence
  Synthetic
guuccauauggugucacug

SEQ ID NO: 1643 - RNA, 19 nt, Artificial Sequence
  Synthetic
ccccgccgagugcaccucg

SEQ ID NO: 1644 - RNA, 19 nt, Artificial Sequence
  Synthetic
cacagccaggcgggcugcc

SEQ ID NO: 1645 - RNA, 19 nt, Artificial Sequence
  Synthetic
cagcucuaccacgcagccc

SEQ ID NO: 1646 - RNA, 19 nt, Artificial Sequence
  Synthetic
uguggccaccuugaagacc

SEQ ID NO: 1647 - RNA, 19 nt, Artificial Sequence
  Synthetic
gccauucuucagcuccccu

SEQ ID NO: 1648 - RNA, 19 nt, Artificial Sequence
  Synthetic
ggggcggaccacagcaaag

SEQ ID NO: 1649 - RNA, 19 nt, Artificial Sequence
  Synthetic
cuccgcaugguguccaggg

SEQ ID NO: 1650 - RNA, 19 nt, Artificial Sequence
  Synthetic
gcccaugggcgugcucucc

SEQ ID NO: 1651 - RNA, 19 nt, Artificial Sequence
  Synthetic
ggaguugaaguagcaaaag

SEQ ID NO: 1652 - RNA, 19 nt, Artificial Sequence
  Synthetic
cuuggcugccacggccacg

SEQ ID NO: 1653 - RNA, 19 nt, Artificial Sequence
  Synthetic
caaccucugcugcagaagc

SEQ ID NO: 1654 - RNA, 19 nt, Artificial Sequence
  Synthetic
gaggaucuugcucacgcuc

SEQ ID NO: 1655 - RNA, 19 nt, Artificial Sequence
  Synthetic
cacgucccaguccacgaug

SEQ ID NO: 1656 - RNA, 19 nt, Artificial Sequence
  Synthetic
ggucccguuuccauggugc

SEQ ID NO: 1657 - RNA, 19 nt, Artificial Sequence
  Synthetic
gcuguagaaagccugcugg

SEQ ID NO: 1658 - RNA, 19 nt, Artificial Sequence
  Synthetic
guacaggacgcuagggucg

SEQ ID NO: 1659 - RNA, 19 nt, Artificial Sequence
  Synthetic
guagcgguggagggacaug

SEQ ID NO: 1660 - RNA, 19 nt, Artificial Sequence
  Synthetic
gaagaaguucccaucgucg

SEQ ID NO: 1661 - RNA, 19 nt, Artificial Sequence
  Synthetic
aggagccccgcugccuggg

SEQ ID NO: 1662 - RNA, 19 nt, Artificial Sequence
  Synthetic
cccugugcccaccucauca

SEQ ID NO: 1663 - RNA, 19 nt, Artificial Sequence
  Synthetic
guugaaacccacgccgggc

SEQ ID NO: 1664 - RNA, 19 nt, Artificial Sequence
  Synthetic
ggugaaagccauguugacg

SEQ ID NO: 1665 - RNA, 19 nt, Artificial Sequence
  Synthetic
ggggggguccaggccgccg

SEQ ID NO: 1666 - RNA, 19 nt, Artificial Sequence
  Synthetic
guacucagcgucucccaug

SEQ ID NO: 1667 - RNA, 19 nt, Artificial Sequence
  Synthetic
cguucugaaggccgccaag

SEQ ID NO: 1668 - RNA, 19 nt, Artificial Sequence
  Synthetic
ggcgaucggcaugaccacc

SEQ ID NO: 1669 - RNA, 19 nt, Artificial Sequence
  Synthetic
auccggggcaaacucgcug

SEQ ID NO: 1670 - RNA, 19 nt, Artificial Sequence
  Synthetic
ugaugacaccagcaccaca

SEQ ID NO: 1671 - RNA, 19 nt, Artificial Sequence
  Synthetic
cuccacggcaucgaagccu

SEQ ID NO: 1672 - RNA, 19 nt, Artificial Sequence
  Synthetic
aagaggggugggguggccc

SEQ ID NO: 1673 - RNA, 19 nt, Artificial Sequence
  Synthetic
ggagagguuguagccccca

SEQ ID NO: 1674 - RNA, 19 nt, Artificial Sequence
  Synthetic
guacccgaagcaucuggcg

SEQ ID NO: 1675 - RNA, 19 nt, Artificial Sequence
  Synthetic
caucagcugcuucgucagg

SEQ ID NO: 1676 - RNA, 19 nt, Artificial Sequence
  Synthetic
ccggccgccagccaggccc

SEQ ID NO: 1677 - RNA, 19 nt, Artificial Sequence
  Synthetic
cucgagggccaggacaauc

SEQ ID NO: 1678 - RNA, 19 nt, Artificial Sequence
  Synthetic
ggucaggucguggccuccc

SEQ ID NO: 1679 - RNA, 19 nt, Artificial Sequence
  Synthetic
cgaggcgucgcaaauggcg

SEQ ID NO: 1680 - RNA, 19 nt, Artificial Sequence
  Synthetic
ggcagaaacacaugcuucc

SEQ ID NO: 1681 - RNA, 19 nt, Artificial Sequence
  Synthetic
aagcucguuucccagcaag

SEQ ID NO: 1682 - RNA, 19 nt, Artificial Sequence
  Synthetic
cuuuucugggagaggauca

SEQ ID NO: 1683 - RNA, 19 nt, Artificial Sequence
  Synthetic
gggucuuugcuguaaaacc

SEQ ID NO: 1684 - RNA, 19 nt, Artificial Sequence
  Synthetic
acggacagcguuugcauug

SEQ ID NO: 1685 - RNA, 19 nt, Artificial Sequence
  Synthetic
caugacuuucuccauggaa

SEQ ID NO: 1686 - RNA, 19 nt, Artificial Sequence
  Synthetic
guacuugcuguggaucucc

SEQ ID NO: 1687 - RNA, 19 nt, Artificial Sequence
  Synthetic
gcgcugcaggcagcgccag

SEQ ID NO: 1688 - RNA, 19 nt, Artificial Sequence
  Synthetic
ccccgcuguggagguugug

SEQ ID NO: 1689 - RNA, 19 nt, Artificial Sequence
  Synthetic
agccucgaucagagaacgc

SEQ ID NO: 1690 - RNA, 19 nt, Artificial Sequence
  Synthetic
uucguucucgcaagucuga

SEQ ID NO: 1691 - RNA, 19 nt, Artificial Sequence
  Synthetic
ggugaccgucucggcuucu

SEQ ID NO: 1692 - RNA, 19 nt, Artificial Sequence
  Synthetic
ggacagcgaggccauggcg

SEQ ID NO: 1693 - RNA, 19 nt, Artificial Sequence
  Synthetic
ggcgggcuucacgcccacg

SEQ ID NO: 1694 - RNA, 19 nt, Artificial Sequence
  Synthetic
cucaucuggucucuuuucg

SEQ ID NO: 1695 - RNA, 19 nt, Artificial Sequence
  Synthetic
cuccucuuccaugggcucc

SEQ ID NO: 1696 - RNA, 19 nt, Artificial Sequence
  Synthetic
ggagugcuacaggggcggc

SEQ ID NO: 1697 - RNA, 19 nt, Artificial Sequence
  Synthetic
gagaacagcagcuucgagg

SEQ ID NO: 1698 - RNA, 19 nt, Artificial Sequence
  Synthetic
acagagacagacagacaag

SEQ ID NO: 1699 - RNA, 19 nt, Artificial Sequence
  Synthetic
ucuuggcugagcuucaaga

SEQ ID NO: 1700 - RNA, 19 nt, Artificial Sequence
  Synthetic
gcgugacacgggaaaguuu

SEQ ID NO: 1701 - RNA, 19 nt, Artificial Sequence
  Synthetic
ccccacggugggacgcagg

SEQ ID NO: 1702 - RNA, 19 nt, Artificial Sequence
  Synthetic
cugggugcuccaagagagc

SEQ ID NO: 1703 - RNA, 19 nt, Artificial Sequence
  Synthetic
guugcacgcuggguguccc

SEQ ID NO: 1704 - RNA, 19 nt, Artificial Sequence
  Synthetic
gaaaggcuucccguggcug

SEQ ID NO: 1705 - RNA, 19 nt, Artificial Sequence
  Synthetic
cugugggccugggcggcag

SEQ ID NO: 1706 - RNA, 19 nt, Artificial Sequence
  Synthetic
gcaugugcgucucgagacc

SEQ ID NO: 1707 - RNA, 19 nt, Artificial Sequence
  Synthetic
gcugccacgcccaggcgug

SEQ ID NO: 1708 - RNA, 19 nt, Artificial Sequence
  Synthetic
ucccguguucccugugagg

SEQ ID NO: 1709 - RNA, 19 nt, Artificial Sequence
  Synthetic
gcgcgucgccggcgucugu

SEQ ID NO: 1710 - RNA, 19 nt, Artificial Sequence
  Synthetic
ccgcguguccgugugucug

SEQ ID NO: 1711 - RNA, 19 nt, Artificial Sequence
  Synthetic
ccagagugugcuuggcuuc

SEQ ID NO: 1712 - RNA, 19 nt, Artificial Sequence
  Synthetic
cgucccuugcgggacccgc

SEQ ID NO: 1713 - RNA, 19 nt, Artificial Sequence
  Synthetic
ggcuccuuucuuccacggc

SEQ ID NO: 1714 - RNA, 19 nt, Artificial Sequence
  Synthetic
cggccgccuguugccacag

SEQ ID NO: 1715 - RNA, 19 nt, Artificial Sequence
  Synthetic
caacugaauucggcagcuc

SEQ ID NO: 1716 - RNA, 19 nt, Artificial Sequence
  Synthetic
guuuucugugccucguguc

SEQ ID NO: 1717 - RNA, 19 nt, Artificial Sequence
  Synthetic
auuagaucuuugauauuug

SEQ ID NO: 1718 - RNA, 19 nt, Artificial Sequence
  Synthetic
ucaaguuuguuuuguauua

SEQ ID NO: 1719 - RNA, 19 nt, Artificial Sequence
  Synthetic
uuuaagcaccaguuuuaau

SEQ ID NO: 1720 - RNA, 19 nt, Artificial Sequence
  Synthetic
gaguuguggguaauaaacu

SEQ ID NO: 1721 - RNA, 19 nt, Artificial Sequence
  Synthetic
guuuacacagagacugugg

SEQ ID NO: 1722 - RNA, 19 nt, Artificial Sequence
  Synthetic
uacaagaugagucgagugg

SEQ ID NO: 1723 - RNA, 19 nt, Artificial Sequence
  Synthetic
uuuaaaaaaaaaauaagcu

SEQ ID NO: 1724 - RNA, 19 nt, Artificial Sequence
  Synthetic
gccguagaaaacguccucu

SEQ ID NO: 1725 - RNA, 19 nt, Artificial Sequence
  Synthetic
ucacagaggcgggccacag

SEQ ID NO: 1726 - RNA, 19 nt, Artificial Sequence
  Synthetic
gccgcacaccgcuaugguu

SEQ ID NO: 1727 - RNA, 19 nt, Artificial Sequence
  Synthetic
cccgggugcagaccccccg

SEQ ID NO: 1728 - RNA, 19 nt, Artificial Sequence
  Synthetic
aggucccucugucccccac

SEQ ID NO: 1729 - RNA, 19 nt, Artificial Sequence
  Synthetic
caguuuuguuuucuuuaaa

SEQ ID NO: 1730 - RNA, 19 nt, Artificial Sequence
  Synthetic
cacauuccuguuucugucc

SEQ ID NO: 1731 - RNA, 19 nt, Artificial Sequence
  Synthetic
aagccagcucccccagcuc

SEQ ID NO: 1732 - RNA, 19 nt, Artificial Sequence
  Synthetic
auggcuuuugagaaacuca

SEQ ID NO: 1733 - RNA, 19 nt, Artificial Sequence
  Synthetic
acaaacucgcaucuuccga

SEQ ID NO: 1734 - RNA, 19 nt, Artificial Sequence
  Synthetic
agcaauaaaaaaaaaggca

SEQ ID NO: 1735 - RNA, 19 nt, Artificial Sequence
  Synthetic
gccacaaaaauccaccaga

SEQ ID NO: 1736 - RNA, 19 nt, Artificial Sequence
  Synthetic
cagacuucagaaaacccag

SEQ ID NO: 1737 - RNA, 19 nt, Artificial Sequence
  Synthetic
ucuuaaggcauuguuccuc

SEQ ID NO: 1738 - RNA, 19 nt, Artificial Sequence
  Synthetic
uuccugcuguuuguuuuuu

SEQ ID NO: 1739 - RNA, 19 nt, Artificial Sequence
  Synthetic
aggaaacugucccaccgau

SEQ ID NO: 1740 - RNA, 19 nt, Artificial Sequence
  Synthetic
ccaggcucggcuggccaca

SEQ ID NO: 1741 - RNA, 19 nt, Artificial Sequence
  Synthetic
cucgcggugccagcacugc

SEQ ID NO: 1742 - RNA, 19 nt, Artificial Sequence
  Synthetic
cuugaggcgucaggccagc

SEQ ID NO: 1743 - RNA, 19 nt, Artificial Sequence
  Synthetic
ugacggcuggugcccgugc

SEQ ID NO: 1744 - RNA, 19 nt, Artificial Sequence
  Synthetic
agccccuggccccggagau

SEQ ID NO: 1745 - RNA, 19 nt, Artificial Sequence
  Synthetic
cagggaccgccgggcugca

SEQ ID NO: 1746 - RNA, 19 nt, Artificial Sequence
  Synthetic
aacagcaauaaagcaaaac

SEQ ID NO: 1747 - RNA, 19 nt, Artificial Sequence
  Synthetic
cuaccuccauuuuucuuaa

SEQ ID NO: 1748 - RNA, 19 nt, Artificial Sequence
  Synthetic
uuugccacuuuuuuggaac

SEQ ID NO: 1749 - RNA, 19 nt, Artificial Sequence
  Synthetic
ucaaaaccuccaacgggau

SEQ ID NO: 1750 - RNA, 19 nt, Artificial Sequence
  Synthetic
uuuaaaauuuguuggacuu

SEQ ID NO: 1751 - RNA, 19 nt, Artificial Sequence
  Synthetic
gagaacacuuuggauucgu

SEQ ID NO: 1752 - RNA, 19 nt, Artificial Sequence
  Synthetic
caaucguaugugacgugug

SEQ ID NO: 1753 - RNA, 19 nt, Artificial Sequence
  Synthetic
cgaccagauggagaugcuc

SEQ ID NO: 1754 - RNA, 19 nt, Artificial Sequence
  Synthetic
ugccuaccacaugcuucac

SEQ ID NO: 1755 - RNA, 19 nt, Artificial Sequence
  Synthetic
aucguaacacugcaagugu

SEQ ID NO: 1756 - RNA, 19 nt, Artificial Sequence
  Synthetic
uuaauaaaaagcauuccga

SEQ ID NO: 1757 - RNA, 19 nt, Artificial Sequence
  Synthetic
acuucaugcuacuugcuuu

SEQ ID NO: 1758 - RNA, 19 nt, Artificial Sequence
  Synthetic
accuaaaauuuaagcaaua

SEQ ID NO: 1759 - RNA, 19 nt, Artificial Sequence
  Synthetic
auauauauauuuauuuaua

SEQ ID NO: 1760 - RNA, 19 nt, Artificial Sequence
  Synthetic
uuggaauauauauuauaca

SEQ ID NO: 1761 - RNA, 19 nt, Artificial Sequence
  Synthetic
uucuuagcuuggaauacau

SEQ ID NO: 1762 - RNA, 19 nt, Artificial Sequence
  Synthetic
cauaagaaucaaguaaguu

SEQ ID NO: 1763 - RNA, 19 nt, Artificial Sequence
  Synthetic
aauauuuuaucaagauuuc

SEQ ID NO: 1764 - RNA, 19 nt, Artificial Sequence
  Synthetic
uucuauaaaugcauuauaa

SEQ ID NO: 1765 - RNA, 19 nt, Artificial Sequence
  Synthetic
uauauauauauauacuuuu

SEQ ID NO: 1766 - RNA, 19 nt, Artificial Sequence
  Synthetic
caaucugcauucauuuuau

SEQ ID NO: 1767 - RNA, 19 nt, Artificial Sequence
  Synthetic
cauuugcagggaccuucgc

SEQ ID NO: 1768 - RNA, 19 nt, Artificial Sequence
  Synthetic
gcaaauucacaagccaucc

SEQ ID NO: 1769 - RNA, 19 nt, Artificial Sequence
  Synthetic
uccauaagcaccuugagag

SEQ ID NO: 1770 - RNA, 19 nt, Artificial Sequence
  Synthetic
aaucaaucaggaucccuuu

SEQ ID NO: 1771 - RNA, 19 nt, Artificial Sequence
  Synthetic
ugagaaaacaugaauuuca

SEQ ID NO: 1772 - RNA, 19 nt, Artificial Sequence
  Synthetic
ucuagccaaucuggagcuu

SEQ ID NO: 1773 - RNA, 19 nt, Artificial Sequence
  Synthetic
uguguuggcgaucugaaau

SEQ ID NO: 1774 - RNA, 19 nt, Artificial Sequence
  Synthetic
uaguugcccaguggcgaau

SEQ ID NO: 1775 - RNA, 19 nt, Artificial Sequence
  Synthetic
aaguacaaacuuguagggu

SEQ ID NO: 1776 - RNA, 19 nt, Artificial Sequence
  Synthetic
agaaaauaauuaaaaugaa

SEQ ID NO: 1777 - RNA, 19 nt, Artificial Sequence
  Synthetic
gacgggagcgguucuguua

SEQ ID NO: 1778 - RNA, 19 nt, Artificial Sequence
  Synthetic
ugugcaugaaggcuuggag

SEQ ID NO: 1779 - RNA, 19 nt, Artificial Sequence
  Synthetic
aaacucauuagguacauau

SEQ ID NO: 1780 - RNA, 19 nt, Artificial Sequence
  Synthetic
uuauauucuuugcuauaaa

SEQ ID NO: 1781 - RNA, 19 nt, Artificial Sequence
  Synthetic
caaaaaucaacagcaaauu

SEQ ID NO: 1782 - RNA, 19 nt, Artificial Sequence
  Synthetic
uuugugaaaaaauucauac

SEQ ID NO: 1783 - RNA, 19 nt, Artificial Sequence
  Synthetic
augcuuauucaggaucuuu

SEQ ID NO: 1784 - RNA, 19 nt, Artificial Sequence
  Synthetic
uguaaaauucauaaaacaa

SEQ ID NO: 1785 - RNA, 19 nt, Artificial Sequence
  Synthetic
cuaaauggugaggaaaaau

SEQ ID NO: 1786 - RNA, 19 nt, Artificial Sequence
  Synthetic
uuaccauucagaaaauugc

SEQ ID NO: 1787 - RNA, 19 nt, Artificial Sequence
  Synthetic
aaaaagauuuagacauuau

SEQ ID NO: 1788 - RNA, 19 nt, Artificial Sequence
  Synthetic
agcaagaauucagaaagga

SEQ ID NO: 1789 - RNA, 19 nt, Artificial Sequence
  Synthetic
gguaaaaaaaaauguacaa

SEQ ID NO: 1790 - RNA, 19 nt, Artificial Sequence
  Synthetic
aauuaaaaaccuuugaaag

SEQ ID NO: 1791 - RNA, 19 nt, Artificial Sequence
  Synthetic
aaaaauaaaaacaaaaaua

SEQ ID NO: 1792 - RNA, 19 nt, Artificial Sequence
  Synthetic
gcagaaaacucaucguaca

SEQ ID NO: 1793 - RNA, 19 nt, Artificial Sequence
  Synthetic
gcaacaauucuguacgcug

SEQ ID NO: 1794 - RNA, 19 nt, Artificial Sequence
  Synthetic
ugaaaauagaaucugacag

SEQ ID NO: 1795 - RNA, 19 nt, Artificial Sequence
  Synthetic
gucccuccucucacuuucu

SEQ ID NO: 1796 - RNA, 19 nt, Artificial Sequence
  Synthetic
acuccgaaaagaccuacgg

SEQ ID NO: 1797 - RNA, 19 nt, Artificial Sequence
  Synthetic
gacacaaucguugguguca

SEQ ID NO: 1798 - RNA, 19 nt, Artificial Sequence
  Synthetic
cuaggacagaccaggaaag

SEQ ID NO: 1799 - RNA, 19 nt, Artificial Sequence
  Synthetic
ggcuucuuuauacagcucc

SEQ ID NO: 1800 - RNA, 19 nt, Artificial Sequence
  Synthetic
aguuaaaaagagccccugg

SEQ ID NO: 1801 - RNA, 19 nt, Artificial Sequence
  Synthetic
aauacuacuaguguugaaa

SEQ ID NO: 1802 - RNA, 19 nt, Artificial Sequence
  Synthetic
aaacacaccaccccucgua

SEQ ID NO: 1803 - RNA, 19 nt, Artificial Sequence
  Synthetic
ccuugccacggaggggaaa

SEQ ID NO: 1804 - RNA, 19 nt, Artificial Sequence
  Synthetic
cuaagcaacccucccugcc

SEQ ID NO: 1805 - RNA, 19 nt, Artificial Sequence
  Synthetic
ccaggguggccgggcaucc

SEQ ID NO: 1806 - RNA, 19 nt, Artificial Sequence
  Synthetic
cggcaucuggcaagccucc

SEQ ID NO: 1807 - RNA, 19 nt, Artificial Sequence
  Synthetic
auuaaugcugacugccccc

SEQ ID NO: 1808 - RNA, 19 nt, Artificial Sequence
  Synthetic
aguuuaaacaugaguuuca

SEQ ID NO: 1809 - RNA, 19 nt, Artificial Sequence
  Synthetic
ugacgauguggucagagaa

SEQ ID NO: 1810 - RNA, 19 nt, Artificial Sequence
  Synthetic
caaguuagaauucuauccu

SEQ ID NO: 1811 - RNA, 19 nt, Artificial Sequence
  Synthetic
aaaggucuuuggaaaacuc

SEQ ID NO: 1812 - RNA, 19 nt, Artificial Sequence
  Synthetic
gcauugcugacaugcucaa

SEQ ID NO: 1813 - RNA, 19 nt, Artificial Sequence
  Synthetic
gccccacgugugccccaug

SEQ ID NO: 1814 - RNA, 19 nt, Artificial Sequence
  Synthetic
aacccaaguggguaaagag

SEQ ID NO: 1815 - RNA, 19 nt, Artificial Sequence
  Synthetic
acguggcugcaguggaaaa

SEQ ID NO: 1816 - RNA, 19 nt, Artificial Sequence
  Synthetic
caaaauccagggcuggcca

SEQ ID NO: 1817 - RNA, 19 nt, Artificial Sequence
  Synthetic
ccuugcagccacaggcucc

SEQ ID NO: 1818 - RNA, 19 nt, Artificial Sequence
  Synthetic
aacaagggucccuggguuc

SEQ ID NO: 1819 - RNA, 19 nt, Artificial Sequence
  Synthetic
ccugcagguucaccaggca

SEQ ID NO: 1820 - RNA, 19 nt, Artificial Sequence
  Synthetic
ucaggcaaucauacccucc

SEQ ID NO: 1821 - RNA, 19 nt, Artificial Sequence
  Synthetic
aaagacuggcuguccuggu

SEQ ID NO: 1822 - RNA, 19 nt, Artificial Sequence
  Synthetic
guugaagagaaaaagagua

SEQ ID NO: 1823 - RNA, 19 nt, Artificial Sequence
  Synthetic
acgugacugucaguuacug

SEQ ID NO: 1824 - RNA, 19 nt, Artificial Sequence
  Synthetic
aaauaaguuaccaguaaaa

SEQ ID NO: 1825 - RNA, 19 nt, Artificial Sequence
  Synthetic
guggcuucaugugcuggaa

SEQ ID NO: 1826 - RNA, 19 nt, Artificial Sequence
  Synthetic
cacuuuggaaugaaacugg

SEQ ID NO: 1827 - RNA, 19 nt, Artificial Sequence
  Synthetic
aagucugaacccaauauac

SEQ ID NO: 1828 - RNA, 19 nt, Artificial Sequence
  Synthetic
gucugaacuucugccccca

SEQ ID NO: 1829 - RNA, 19 nt, Artificial Sequence
  Synthetic
cccuccugagcacggugug

SEQ ID NO: 1830 - RNA, 19 nt, Artificial Sequence
  Synthetic
cgaaacucggcucuggguc

SEQ ID NO: 1831 - RNA, 19 nt, Artificial Sequence
  Synthetic
guaaacuuuaccaaacucc

SEQ ID NO: 1832 - RNA, 19 nt, Artificial Sequence
  Synthetic
aauuucagaagcuacccug

SEQ ID NO: 1833 - RNA, 19 nt, Artificial Sequence
  Synthetic
uggucaaaaguuugaguua

SEQ ID NO: 1834 - RNA, 19 nt, Artificial Sequence
  Synthetic
caagaaucugcacucauuu

SEQ ID NO: 1835 - RNA, 19 nt, Artificial Sequence
  Synthetic
ccagugaccaagugaaucc

SEQ ID NO: 1836 - RNA, 19 nt, Artificial Sequence
  Synthetic
gagcugaccaucagcagcc

SEQ ID NO: 1837 - RNA, 19 nt, Artificial Sequence
  Synthetic
ucucaaaccacugucucag

SEQ ID NO: 1838 - RNA, 19 nt, Artificial Sequence
  Synthetic
caagaccguucugccugcu

SEQ ID NO: 1839 - RNA, 19 nt, Artificial Sequence
  Synthetic
ggaaagucaaacaaguccc

SEQ ID NO: 1840 - RNA, 19 nt, Artificial Sequence
  Synthetic
gaguggccaccagggaggg

SEQ ID NO: 1841 - RNA, 19 nt, Artificial Sequence
  Synthetic
ucugggcuucagagcaaag

SEQ ID NO: 1842 - RNA, 19 nt, Artificial Sequence
  Synthetic
accagcuccucuugccaau

SEQ ID NO: 1843 - RNA, 19 nt, Artificial Sequence
  Synthetic
gccaugaauggggaaugga

SEQ ID NO: 1844 - RNA, 19 nt, Artificial Sequence
  Synthetic
gcccugccacugcucugug

SEQ ID NO: 1845 - RNA, 19 nt, Artificial Sequence
  Synthetic
gaagagccugcuagcuggg

SEQ ID NO: 1846 - RNA, 19 nt, Artificial Sequence
  Synthetic
augaggccaaggaggccag

SEQ ID NO: 1847 - RNA, 19 nt, Artificial Sequence
  Synthetic
cagagggcuaugcagagaa

SEQ ID NO: 1848 - RNA, 19 nt, Artificial Sequence
  Synthetic
ggcagguggcaggaucccc

SEQ ID NO: 1849 - RNA, 19 nt, Artificial Sequence
  Synthetic
gccacggcgggguaagagg

SEQ ID NO: 1850 - RNA, 19 nt, Artificial Sequence
  Synthetic
augcauuccuccccauaag

SEQ ID NO: 1851 - RNA, 19 nt, Artificial Sequence
  Synthetic
aaaaaaaaaagugagauga

SEQ ID NO: 1852 - RNA, 19 nt, Artificial Sequence
  Synthetic
uaucccaucaucugcuuaa

SEQ ID NO: 1853 - RNA, 19 nt, Artificial Sequence
  Synthetic
ccacugagcaguccauguu

SEQ ID NO: 1854 - RNA, 19 nt, Artificial Sequence
  Synthetic
cccccacugauaaccuggc

SEQ ID NO: 1855 - RNA, 19 nt, Artificial Sequence
  Synthetic
ugagauuagaauuaagucc

SEQ ID NO: 1856 - RNA, 19 nt, Artificial Sequence
  Synthetic
agggcgucuccauuugaau

SEQ ID NO: 1857 - RNA, 19 nt, Artificial Sequence
  Synthetic
ccugccaggccuuugcaga

SEQ ID NO: 1858 - RNA, 19 nt, Artificial Sequence
  Synthetic
agaugaaacgugccucccc

SEQ ID NO: 1859 - RNA, 19 nt, Artificial Sequence
  Synthetic
aagcuggagugagcugaca

SEQ ID NO: 1860 - RNA, 19 nt, Artificial Sequence
  Synthetic
gcucucagcacauuuguga

SEQ ID NO: 1861 - RNA, 19 nt, Artificial Sequence
  Synthetic
aaaaggcuacacaguaaug

SEQ ID NO: 1862 - RNA, 19 nt, Artificial Sequence
  Synthetic
ccgagugugucuucaaaga

SEQ ID NO: 1863 - RNA, 19 nt, Artificial Sequence
  Synthetic
gcuugcuguggagaagagc

SEQ ID NO: 1864 - RNA, 19 nt, Artificial Sequence
  Synthetic
cugccaucugcccuggacg

SEQ ID NO: 1865 - RNA, 19 nt, Artificial Sequence
  Synthetic
gacgccgaggcagauccuc

SEQ ID NO: 1866 - RNA, 19 nt, Artificial Sequence
  Synthetic
gacguggucccgccugcag

SEQ ID NO: 1867 - RNA, 19 nt, Artificial Sequence
  Synthetic
caugaaggaacccucccug

SEQ ID NO: 1868 - RNA, 19 nt, Artificial Sequence
  Synthetic
ggacccacagggagaacac

SEQ ID NO: 1869 - RNA, 19 nt, Artificial Sequence
  Synthetic
aaaaggcuaaagguccaag

SEQ ID NO: 1870 - RNA, 19 nt, Artificial Sequence
  Synthetic
ggccuuugcaaaggaagaa

SEQ ID NO: 1871 - RNA, 19 nt, Artificial Sequence
  Synthetic
cccagccagugcccccaag

SEQ ID NO: 1872 - RNA, 19 nt, Artificial Sequence
  Synthetic
agugcucgcuugcugacuc

SEQ ID NO: 1873 - RNA, 19 nt, Artificial Sequence
  Synthetic
ucccucaaagggauauaaa

SEQ ID NO: 1874 - RNA, 19 nt, Artificial Sequence
  Synthetic
aguggcgucaucaggguuu

SEQ ID NO: 1875 - RNA, 19 nt, Artificial Sequence
  Synthetic
gcagacgccaagaggccca

SEQ ID NO: 1876 - RNA, 19 nt, Artificial Sequence
  Synthetic
ggaagccgcgagggcaggg

SEQ ID NO: 1877 - RNA, 19 nt, Artificial Sequence
  Synthetic
gcacgcugcggcacggcgg

SEQ ID NO: 1878 - RNA, 19 nt, Artificial Sequence
  Synthetic
uggggcgugggcacguggg

SEQ ID NO: 1879 - RNA, 19 nt, Artificial Sequence
  Synthetic
gggacagccgccugcuggu

SEQ ID NO: 1880 - RNA, 19 nt, Artificial Sequence
  Synthetic
cagcgggccacggccuccg

SEQ ID NO: 1881 - RNA, 19 nt, Artificial Sequence
  Synthetic
gggaggggcggccaguccc

SEQ ID NO: 1882 - RNA, 19 nt, Artificial Sequence
  Synthetic
cagagcccugggacgcugg

SEQ ID NO: 1883 - RNA, 19 nt, Artificial Sequence
  Synthetic
aaaguggcccuccagaacc

SEQ ID NO: 1884 - RNA, 19 nt, Artificial Sequence
  Synthetic
aaacugaaacaccuugaca

SEQ ID NO: 1885 - RNA, 19 nt, Artificial Sequence
  Synthetic
uucaaaagaaguaaagaaa

SEQ ID NO: 1886 - RNA, 19 nt, Artificial Sequence
  Synthetic
uccccuugcaaacagauuu

SEQ ID NO: 1887 - RNA, 19 nt, Artificial Sequence
  Synthetic
ccauuacgaaaugguccuu

SEQ ID NO: 1888 - RNA, 19 nt, Artificial Sequence
  Synthetic
acuugcuuuugugucagac

SEQ ID NO: 1889 - RNA, 19 nt, Artificial Sequence
  Synthetic
uagugcugcaaaaaucaaa

SEQ ID NO: 1890 - RNA, 19 nt, Artificial Sequence
  Synthetic
aacaacaaaguccauugcu

SEQ ID NO: 1891 - RNA, 19 nt, Artificial Sequence
  Synthetic
guucugaucaaaaagaaaa

SEQ ID NO: 1892 - RNA, 19 nt, Artificial Sequence
  Synthetic
gaccaguaaagaaggaaug

SEQ ID NO: 1893 - RNA, 19 nt, Artificial Sequence
  Synthetic
gaaugagcacguggcugug

SEQ ID NO: 1894 - RNA, 19 nt, Artificial Sequence
  Synthetic
ucuacaaaaagaagaaugg

SEQ ID NO: 1895 - RNA, 19 nt, Artificial Sequence
  Synthetic
aaacacgugggcccaaagu

SEQ ID NO: 1896 - RNA, 19 nt, Artificial Sequence
  Synthetic
uauguaucaaugcccauaa

SEQ ID NO: 1897 - RNA, 19 nt, Artificial Sequence
  Synthetic
uauaucuauauauuuauau

SEQ ID NO: 1898 - RNA, 19 nt, Artificial Sequence
  Synthetic
aauauauucauauauauuu

SEQ ID NO: 1899 - RNA, 19 nt, Artificial Sequence
  Synthetic
guguaggaaacuuaaaaaa

SEQ ID NO: 1900 - RNA, 19 nt, Artificial Sequence
  Synthetic
aguccaugcaaccuccagg

SEQ ID NO: 1901 - RNA, 19 nt, Artificial Sequence
  Synthetic
aagucaugccggucguaca

SEQ ID NO: 1902 - RNA, 19 nt, Artificial Sequence
  Synthetic
aaaucuguauacaauauaa

SEQ ID NO: 1903 - RNA, 19 nt, Artificial Sequence
  Synthetic
ugccgaguuuggcgugcaa

SEQ ID NO: 1904 - RNA, 19 nt, Artificial Sequence
  Synthetic
uuucuucuuccccaaagcu

SEQ ID NO: 1905 - RNA, 19 nt, Artificial Sequence
  Synthetic
ggggaacagaaaggcauuu

SEQ ID NO: 1906 - RNA, 19 nt, Artificial Sequence
  Synthetic
ucugcaaaugucaugagag

SEQ ID NO: 1907 - RNA, 19 nt, Artificial Sequence
  Synthetic
aaauuuccaucuuuuguau

SEQ ID NO: 1908 - RNA, 19 nt, Artificial Sequence
  Synthetic
agguuuuguuuuacagaaa

SEQ ID NO: 1909 - RNA, 19 nt, Artificial Sequence
  Synthetic
ccgcccuccucuccuucaa

SEQ ID NO: 1910 - RNA, 19 nt, Artificial Sequence
  Synthetic
aauaagacgcaaacuuccc

SEQ ID NO: 1911 - RNA, 19 nt, Artificial Sequence
  Synthetic
uuucuuaagaauaaguuca

SEQ ID NO: 1912 - RNA, 19 nt, Artificial Sequence
  Synthetic
uuacaauaaaaaguacaau

SEQ ID NO: 1913 - RNA, 19 nt, Artificial Sequence
  Synthetic
uaguccuuuuuauuuuucu

SEQ ID NO: 1914 - RNA, 19 nt, Artificial Sequence
  Synthetic
auaugacaaauguuuaagu

SEQ ID NO: 1915 - RNA, 19 nt, Artificial Sequence
  Synthetic
gauaaacuuuuuuucuuaa

SEQ ID NO: 1916 - RNA, 19 nt, Artificial Sequence
  Synthetic
gguaugucacaagugcuag

SEQ ID NO: 1917 - RNA, 19 nt, Artificial Sequence
  Synthetic
acaauaaacucuauuauug

SEQ ID NO: 1918 - RNA, 19 nt, Artificial Sequence
  Synthetic
cacuguuuccacauaaaua

SEQ ID NO: 1919 - RNA, 19 nt, Artificial Sequence
  Synthetic
ugaguaguuucccuaaaac

SEQ ID NO: 1920 - RNA, 19 nt, Artificial Sequence
  Synthetic
gcaguucacugugaauucu

SEQ ID NO: 1921 - RNA, 19 nt, Artificial Sequence
  Synthetic
ucaacucgagagagacagg

SEQ ID NO: 1922 - RNA, 19 nt, Artificial Sequence
  Synthetic
aaacaaaauuccuccaaau

SEQ ID NO: 1923 - RNA, 19 nt, Artificial Sequence
  Synthetic
aacaaacaaaacaaaacaa

SEQ ID NO: 1924 - RNA, 19 nt, Artificial Sequence
  Synthetic
uggaaggagauaaaaggaa

SEQ ID NO: 1925 - RNA, 19 nt, Artificial Sequence
  Synthetic
cggcgcucgccuggcccgu

SEQ ID NO: 1926 - RNA, 19 nt, Artificial Sequence
  Synthetic
aaggccagugagggcgggc

SEQ ID NO: 1927 - RNA, 19 nt, Artificial Sequence
  Synthetic
aucagaauaaaccgucaca

SEQ ID NO: 1928 - RNA, 19 nt, Artificial Sequence
  Synthetic
gaguccgcccaguucucaa

SEQ ID NO: 1929 - RNA, 19 nt, Artificial Sequence
  Synthetic
ggaaaaggggacucuuucg

SEQ ID NO: 1930 - RNA, 19 nt, Artificial Sequence
  Synthetic
aagucaacacagcugugcg

SEQ ID NO: 1931 - RNA, 19 nt, Artificial Sequence
  Synthetic
caccuaaaaguaauuaaaa

SEQ ID NO: 1932 - RNA, 19 nt, Artificial Sequence
  Synthetic
gaaaucuuagccauacauc

SEQ ID NO: 1933 - RNA, 19 nt, Artificial Sequence
  Synthetic
uucacgacugcuuaaagug

SEQ ID NO: 1934 - RNA, 19 nt, Artificial Sequence
  Synthetic
accacagugcucgcacagu

SEQ ID NO: 1935 - RNA, 19 nt, Artificial Sequence
  Synthetic
ugcaaaguauaauuguaaa

SEQ ID NO: 1936 - RNA, 19 nt, Artificial Sequence
  Synthetic
gaaaugguuuccuuucgau

SEQ ID NO: 1937 - RNA, 19 nt, Artificial Sequence
  Synthetic
cagcuucguuacaaugaag

SEQ ID NO: 1938 - RNA, 19 nt, Artificial Sequence
  Synthetic
ccgagcuaagaacacgcuc

SEQ ID NO: 1939 - RNA, 19 nt, Artificial Sequence
  Synthetic
gccagagacaaagugaggc

SEQ ID NO: 1940 - RNA, 19 nt, Artificial Sequence
  Synthetic
agcagacuuuuaaucaaug

SEQ ID NO: 1941 - RNA, 23 nt, Artificial Sequence
  Synthetic
guguuacgaucggaaugcuuuuu

SEQ ID NO: 1942 - RNA, 23 nt, Artificial Sequence
  Synthetic
gcggccgagcugccgaauucagu

SEQ ID NO: 1943 - RNA, 23 nt, Artificial Sequence
  Synthetic
uaggugauguauggcuaagauuu

SEQ ID NO: 1944 - RNA, 23 nt, Artificial Sequence
  Synthetic
gagcucguuggagcuaucguuuc

SEQ ID NO: 1945 - RNA, 23 nt, Artificial Sequence
  Synthetic
aggagggaccguaggucuuuucg

SEQ ID NO: 1946 - RNA, 23 nt, Artificial Sequence
  Synthetic
agcucguuggagcuaucguuucc

SEQ ID NO: 1947 - RNA, 23 nt, Artificial Sequence
  Synthetic
aaguuugcgucuuauugaacuua

SEQ ID NO: 1948 - RNA, 23 nt, Artificial Sequence
  Synthetic
gugacgguuuauucugauugaga

SEQ ID NO: 1949 - DNA, 21 bp, Artificial Sequence
  Synthetic
guuacgaucggaaugcuuutt

SEQ ID NO: 1950 - DNA, 21 bp, Artificial Sequence
  Synthetic
ggccgagcugccgaauucatt

SEQ ID NO: 1951 - DNA, 21 bp, Artificial Sequence
  Synthetic
ggugauguauggcuaagautt

SEQ ID NO: 1952 - DNA, 21 bp, Artificial Sequence
  Synthetic
gcucguuggagcuaucguutt

SEQ ID NO: 1953 - DNA, 21 bp, Artificial Sequence
  Synthetic
gagggaccguaggucuuuutt

SEQ ID NO: 1954 - DNA, 21 bp, Artificial Sequence
  Synthetic
cucguuggagcuaucguuutt

SEQ ID NO: 1955 - DNA, 21 bp, Artificial Sequence
  Synthetic
guuugcgucuuauugaacutt

SEQ ID NO: 1956 - DNA, 21 bp, Artificial Sequence
  Synthetic
gacgguuuauucugauugatt

SEQ ID NO: 1957 - DNA, 21 bp, Artificial Sequence
  Synthetic
aaagcauuccgaucguaactt

SEQ ID NO: 1958 - DNA, 21 bp, Artificial Sequence
  Synthetic
ugaauucggcagcucggcctt

SEQ ID NO: 1959 - DNA, 21 bp, Artificial Sequence
  Synthetic
aucuuagccauacaucacctt

SEQ ID NO: 1960 - DNA, 21 bp, Artificial Sequence
  Synthetic
aacgauagcuccaacgagctt

SEQ ID NO: 1961 - DNA, 21 bp, Artificial Sequence
  Synthetic
aaaagaccuacggucccuctt

SEQ ID NO: 1962 - DNA, 21 bp, Artificial Sequence
  Synthetic
aaacgauagcuccaacgagtt

SEQ ID NO: 1963 - DNA, 21 bp, Artificial Sequence
  Synthetic
aguucaauaagacgcaaactt

SEQ ID NO: 1964 - DNA, 21 bp, Artificial Sequence
  Synthetic
ucaaucagaauaaaccguctt

SEQ ID NO: 1965 - DNA, 21 bp, Artificial Sequence
  Synthetic
  misc_feature (1)..(1): 5'-3 attached inverted deoxyabasic moiety.
  misc_feature (2)..(3): 2'-deoxy-2'-fluoro
  misc_feature (5)..(5): 2'-deoxy-2'-fluoro
  misc_feature (8)..(9): 2'-deoxy-2'-fluoro
  misc_feature (14)..(14): 2'-deoxy-2'-fluoro
  misc_feature (16)..(19): 2'-deoxy-2'-fluoro
  misc_feature (21)..(21): 3'-3 attached inverted deoxyabasic moiety.
guuacgaucggaaugcuuutt

SEQ ID NO: 1966 - DNA, 21 bp, Artificial Sequence
  Synthetic
  misc_feature (1)..(1): 5'-3 attached inverted deoxyabasic moiety.
  misc_feature (3)..(4): 2'-deoxy-2'-fluoro
  misc_feature (8)..(9): 2'-deoxy-2'-fluoro
  misc_feature (11)..(12): 2'-deoxy-2'-fluoro
  misc_feature (16)..(18): 2'-deoxy-2'-fluoro
  misc_feature (21)..(21): 3'-3 attached inverted deoxyabasic moiety.
ggccgagcugccgaauucatt

SEQ ID NO: 1967 - DNA, 21 bp, Artificial Sequence
  Synthetic
  misc_feature (1)..(1): 5'-3 attached inverted deoxyabasic moiety.
  misc_feature (3)..(3): 2'-deoxy-2'-fluoro
  misc_feature (6)..(6): 2'-deoxy-2'-fluoro
  misc_feature (8)..(8): 2'-deoxy-2'-fluoro
  misc_feature (10)..(10): 2'-deoxy-2'-fluoro
  misc_feature (13)..(14): 2'-deoxy-2'-fluoro
  misc_feature (19)..(19): 2'-deoxy-2'-fluoro
  misc_feature (21)..(21): 3'-3 attached inverted deoxyabasic moiety.
ggugauguauggcuaagautt

SEQ ID NO: 1968 - DNA, 21 bp, Artificial Sequence
  Synthetic
  misc_feature (1)..(1): 5'-3 attached inverted deoxyabasic moiety.
  misc_feature (2)..(4): 2'-deoxy-2'-fluoro
  misc_feature (6)..(7): 2'-deoxy-2'-fluoro
  misc_feature (12)..(13): 2'-deoxy-2'-fluoro
  misc_feature (15)..(16): 2'-deoxy-2'-fluoro
  misc_feature (18)..(19): 2'-deoxy-2'-fluoro
  misc_feature (21)..(21): 3'-3 attached inverted deoxyabasic moiety.
gcucguuggagcuaucguutt

SEQ ID NO: 1969 - DNA, 21 bp, Artificial Sequence
  Synthetic
  misc_feature (1)..(1): 5'-3 attached inverted deoxyabasic moiety.
  misc_feature (7)..(8): 2'-deoxy-2'-fluoro
  misc_feature (10)..(10): 2'-deoxy-2'-fluoro
  misc_feature (14)..(19): 2'-deoxy-2'-fluoro
  misc_feature (21)..(21): 3'-3 attached inverted deoxyabasic moiety.
gagggaccguaggucuuuutt

SEQ ID NO: 1970 - DNA, 21 bp, Artificial Sequence
  Synthetic
  misc_feature (1)..(1): 5'-3 attached inverted deoxyabasic moiety.
  misc_feature (1)..(3): 2'-deoxy-2'-fluoro
  misc_feature (5)..(6): 2'-deoxy-2'-fluoro
  misc_feature (11)..(12): 2'-deoxy-2'-fluoro
  misc_feature (14)..(15): 2'-deoxy-2'-fluoro
  misc_feature (17)..(19): 2'-deoxy-2'-fluoro
  misc_feature (21)..(21): 3'-3 attached inverted deoxyabasic moiety.
cucguuggagcuaucguuutt

SEQ ID NO: 1971 - DNA, 21 bp, Artificial Sequence
  Synthetic
  misc_feature (1)..(1): 5'-3 attached inverted deoxyabasic moiety.
  misc_feature (2)..(4): 2'-deoxy-2'-fluoro
  misc_feature (6)..(6): 2'-deoxy-2'-fluoro
  misc_feature (8)..(11): 2'-deoxy-2'-fluoro
  misc_feature (13)..(14): 2'-deoxy-2'-fluoro
  misc_feature (18)..(19): 2'-deoxy-2'-fluoro
  misc_feature (21)..(21): 3'-3 attached inverted deoxyabasic moiety.
guuugcgucuuauugaacutt

SEQ ID NO: 1972 - DNA, 21 bp, Artificial Sequence
  Synthetic
  misc_feature (1)..(1): 5'-3 attached inverted deoxyabasic moiety.
  misc_feature (3)..(3): 2'-deoxy-2'-fluoro
  misc_feature (6)..(8): 2'-deoxy-2'-fluoro
  misc_feature (10)..(13): 2'-deoxy-2'-fluoro
  misc_feature (16)..(17): 2'-deoxy-2'-fluoro
  misc_feature (21)..(21): 3'-3 attached inverted deoxyabasic moiety.
gacgguuuauucugauugatt

SEQ ID NO: 1973 - DNA, 21 bp, Artificial Sequence
  Synthetic
  misc_feature (5)..(5): 2'-deoxy-2'-fluoro
  misc_feature (7)..(10): 2'-deoxy-2'-fluoro
  misc_feature (13)..(14): 2'-deoxy-2'-fluoro
  misc_feature (16)..(16): 2'-deoxy-2'-fluoro
  misc_feature (19)..(19): 2'-deoxy-2'-fluoro
  misc_feature (20)..(21): phosphorothioate linkage
aaagcauuccgaucguaactt

SEQ ID NO: 1974 - DNA, 21 bp, Artificial Sequence
  Synthetic
  misc_feature (1)..(1): 2'-deoxy-2'-fluoro
  misc_feature (5)..(7): 2'-deoxy-2'-fluoro
  misc_feature (10)..(10): 2'-deoxy-2'-fluoro
  misc_feature (13)..(15): 2'-deoxy-2'-fluoro
  misc_feature (18)..(19): 2'-deoxy-2'-fluoro
  misc_feature (20)..(21): phosphorothioate linkage
ugaauucggcagcucggcctt

SEQ ID NO: 1975 - DNA, 21 bp, Artificial Sequence
  Synthetic
  misc_feature (2)..(5): 2'-deoxy-2'-fluoro
  misc_feature (8)..(9): 2'-deoxy-2'-fluoro
  misc_feature (11)..(11): 2'-deoxy-2'-fluoro
  misc_feature (13)..(13): 2'-deoxy-2'-fluoro
  misc_feature (15)..(16): 2'-deoxy-2'-fluoro
  misc_feature (18)..(19): 2'-deoxy-2'-fluoro
  misc_feature (20)..(21): phosphorothioate linkage
aucuuagccauacaucacctt

SEQ ID NO: 1976 - DNA, 21 bp, Artificial Sequence
  Synthetic
  misc_feature (3)..(3): 2'-deoxy-2'-fluoro
  misc_feature (6)..(6): 2'-deoxy-2'-fluoro
  misc_feature (9)..(12): 2'-deoxy-2'-fluoro
  misc_feature (15)..(15): 2'-deoxy-2'-fluoro
  misc_feature (19)..(19): 2'-deoxy-2'-fluoro
  misc_feature (20)..(21): phosphorothoiate linkage
aacgauagcuccaacgagctt

SEQ ID NO: 1977 - DNA, 21 bp, Artificial Sequence
  Synthetic
  misc_feature (7)..(9): 2'-deoxy-2'-fluoro
  misc_feature (11)..(11): 2'-deoxy-2'-fluoro
  misc_feature (14)..(19): 2'-deoxy-2'-fluoro
  misc_feature (20)..(21): phosphorothioate linkage
aaaagaccuacggucccuctt

SEQ ID NO: 1978 - DNA, 21 bp, Artificial Sequence
  Synthetic
  misc_feature (4)..(4): 2'-deoxy-2'-fluoro
  misc_feature (7)..(7): 2'-deoxy-2'-fluoro
  misc_feature (10)..(13): 2'-deoxy-2'-fluoro
  misc_feature (16)..(16): 2'-deoxy-2'-fluoro
  misc_feature (20)..(21): phosphorothioate linkage
aaacgauagcuccaacgagtt

SEQ ID NO: 1979 - DNA, 21 bp, Artificial Sequence
  Synthetic
  misc_feature (3)..(5): 2'-deoxy-2'-fluoro
  misc_feature (8)..(8): 2'-deoxy-2'-fluoro
  misc_feature (13)..(13): 2'-deoxy-2'-fluoro
  misc_feature (15)..(15): 2'-deoxy-2'-fluoro
  misc_feature (19)..(19): 2'-deoxy-2'-fluoro
  misc_feature (20)..(21): phosphorothioate linkage
aguucaauaagacgcaaactt

SEQ ID NO: 1980 - DNA, 21 bp, Artificial Sequence
  Synthetic
  misc_feature (1)..(2): 2'-deoxy-2'-fluoro
  misc_feature (5)..(6): 2'-deoxy-2'-fluoro
  misc_feature (11)..(11): 2'-deoxy-2'-fluoro
  misc_feature (15)..(16): 2'-deoxy-2'-fluoro
  misc_feature (18)..(19): 2'-deoxy-2'-fluoro
  misc_feature (20)..(21): phosphorothioate linkage
ucaaucagaauaaaccguctt

SEQ ID NO: 1981 - DNA, 21 bp, Artificial Sequence
  Synthetic
  misc_feature (1)..(1): 5'-3 attached inverted deoxyabasic moiety.
  misc_feature (1)..(1): deoxy
  misc_feature (2)..(3): 2'-deoxy-2'-fluoro
  misc_feature (4)..(4): deoxy
  misc_feature (5)..(5): 2'-deoxy-2'-fluoro
  misc_feature (6)..(7): deoxy
  misc_feature (8)..(9): 2'-deoxy-2'-fluoro
  misc_feature (10)..(13): deoxy
  misc_feature (14)..(14): 2'-deoxy-2'-fluoro
  misc_feature (15)..(15): deoxy
  misc_feature (16)..(19): 2'-deoxy-2'-fluoro
  misc_feature (21)..(21): 3'-3 attached inverted deoxyabasic moiety.
guuacgaucggaaugcuuutt

SEQ ID NO: 1982 - DNA, 21 bp, Artificial Sequence
  Synthetic
  misc_feature (1)..(1): 5'-3 attached inverted deoxyabasic moiety.
  misc_feature (1)..(2): deoxy
  misc_feature (3)..(4): 2'-deoxy-2'-fluoro
  misc_feature (5)..(7): deoxy
  misc_feature (8)..(9): 2'-deoxy-2'-fluoro
  misc_feature (10)..(10): deoxy
  misc_feature (11)..(12): 2'-deoxy-2'-fluoro
  misc_feature (13)..(15): deoxy
  misc_feature (16)..(18): 2'-deoxy-2'-fluoro
  misc_feature (19)..(19): deoxy
  misc_feature (21)..(21): 3'-3 attached inverted deoxyabasic moiety.
ggccgagcugccgaauucatt

SEQ ID NO: 1983 - DNA, 21 bp, Artificial Sequence
  Synthetic
  misc_feature (1)..(1): 5'-3 attached inverted deoxyabasic moiety.
  misc_feature (1)..(2): deoxy
  misc_feature (3)..(3): 2'-deoxy-2'-fluoro
  misc_feature (4)..(5): deoxy
  misc_feature (6)..(6): 2'-deoxy-2'-fluoro
  misc_feature (7)..(7): deoxy
  misc_feature (8)..(8): 2'-deoxy-2'-fluoro
  misc_feature (9)..(9): deoxy
  misc_feature (10)..(10): 2'-deoxy-2'-fluoro
  misc_feature (11)..(12): deoxy
  misc_feature (13)..(14): 2'-deoxy-2'-fluoro
  misc_feature (15)..(18): deoxy
  misc_feature (19)..(19): 2'-deoxy-2'-fluoro
  misc_feature (21)..(21): 3'-3 attached inverted deoxyabasic moiety.
ggugauguauggcuaagautt

SEQ ID NO: 1984 - DNA, 21 bp, Artificial Sequence
  Synthetic
  misc_feature (1)..(1): 5'-3 attached inverted deoxyabasic moiety.
  misc_feature (1)..(1): deoxy
  misc_feature (2)..(4): 2'-deoxy-2'-fluoro
  misc_feature (5)..(5): deoxy
  misc_feature (6)..(7): 2'-deoxy-2'-fluoro
  misc_feature (8)..(11): deoxy
  misc_feature (12)..(13): 2'-deoxy-2'-fluoro
  misc_feature (14)..(14): deoxy
  misc_feature (15)..(16): 2'-deoxy-2'-fluoro
  misc_feature (17)..(17): deoxy
  misc_feature (18)..(19): 2'-deoxy-2'-fluoro
  misc_feature (21)..(21): 3'-3 attached inverted deoxyabasic moiety.
gcucguuggagcuaucguutt

SEQ ID NO: 1985 - DNA, 21 bp, Artificial Sequence
  Synthetic
  misc_feature (1)..(1): 5'-3 attached inverted deoxyabasic moiety.
  misc_feature (1)..(6): deoxy
  misc_feature (7)..(8): 2'-deoxy-2'-fluoro
  misc_feature (9)..(9): deoxy
  misc_feature (10)..(10): 2'-deoxy-2'-fluoro
  misc_feature (11)..(13): deoxy
  misc_feature (14)..(19): 2'-deoxy-2'-fluoro
  misc_feature (21)..(21): 3'-3 attached inverted deoxyabasic moiety.
gagggaccguaggucuuuutt

SEQ ID NO: 1986 - DNA, 21 bp, Artificial Sequence
  Synthetic
  misc_feature (1)..(1): 5'-3 attached inverted deoxyabasic moiety.
  misc_feature (1)..(3): 2'-deoxy-2'-fluoro
  misc_feature (4)..(4): deoxy
  misc_feature (5)..(6): 2'-deoxy-2'-fluoro
  misc_feature (7)..(10): deoxy
  misc_feature (11)..(12): 2'-deoxy-2'-fluoro
  misc_feature (13)..(13): deoxy
  misc_feature (14)..(15): 2'-deoxy-2'-fluoro
  misc_feature (16)..(16): deoxy
  misc_feature (17)..(19): 2'-deoxy-2'-fluoro
  misc_feature (21)..(21): 3'-3 attached inverted deoxyabasic moiety.
cucguuggagcuaucguuutt

SEQ ID NO: 1987 - DNA, 21 bp, Artificial Sequence
  Synthetic
  misc_feature (1)..(1): 5'-3 attached inverted deoxyabasic moiety.
  misc_feature (1)..(1): deoxy
  misc_feature (2)..(4): 2'-deoxy-2'-fluoro
  misc_feature (5)..(5): deoxy
  misc_feature (6)..(6): 2'-deoxy-2'-fluoro
  misc_feature (7)..(7): deoxy
  misc_feature (8)..(11): 2'-deoxy-2'-fluoro
  misc_feature (11)..(11): deoxy
  misc_feature (13)..(14): 2'-deoxy-2'-fluoro
  misc_feature (14)..(17): deoxy
  misc_feature (18)..(19): 2'-deoxy-2'-fluoro
  misc_feature (21)..(21): 3'-3 attached inverted deoxyabasic moiety.
guuugcgucuuauugaacutt

SEQ ID NO: 1988 - DNA, 21 bp, Artificial Sequence
  Synthetic
  misc_feature (1)..(1): 5'-3 attached inverted deoxyabasic moiety.
  misc_feature (1)..(2): deoxy
  misc_feature (3)..(3): 2'-deoxy-2'-fluoro
  misc_feature (4)..(5): deoxy
  misc_feature (6)..(8): 2'-deoxy-2'-fluoro
  misc_feature (9)..(9): deoxy
  misc_feature (10)..(13): 2'-deoxy-2'-fluoro
  misc_feature (14)..(15): deoxy
  misc_feature (16)..(17): 2'-deoxy-2'-fluoro
  misc_feature (18)..(19): deoxy
  misc_feature (21)..(21): 3'-3 attached inverted deoxyabasic moiety.
gacgguuuauucugauugatt

SEQ ID NO: 1989 - DNA, 21 bp, Artificial Sequence
  Synthetic
  misc_feature (1)..(4): deoxy
  misc_feature (5)..(5): 2'-deoxy-2'-fluoro
  misc_feature (6)..(6): deoxy
  misc_feature (7)..(10): 2'-deoxy-2'-fluoro
  misc_feature (11)..(12): deoxy
  misc_feature (13)..(14): 2'-deoxy-2'-fluoro
  misc_feature (15)..(15): deoxy
  misc_feature (16)..(16): 2'-deoxy-2'-fluoro
  misc_feature (17)..(18): deoxy
  misc_feature (19)..(19): 2'-deoxy-2'-fluoro
  misc_feature (20)..(21): phosphorothioate linkage
aaagcauuccgaucguaactt

SEQ ID NO: 1990 - DNA, 21 bp, Artificial Sequence
  Synthetic
  misc_feature (1)..(1): 2'-deoxy-2'-fluoro
  misc_feature (2)..(4): deoxy
  misc_feature (5)..(7): 2'-deoxy-2'-fluoro
  misc_feature (8)..(9): deoxy
  misc_feature (10)..(10): 2'-deoxy-2'-fluoro
  misc_feature (11)..(12): deoxy
  misc_feature (13)..(15): 2'-deoxy-2'-fluoro
  misc_feature (16)..(17): deoxy
  misc_feature (18)..(19): 2'-deoxy-2'-fluoro
  misc_feature (20)..(21): phosphorothioate linkage
ugaauucggcagcucggcctt

SEQ ID NO: 1991 - DNA, 21 bp, Artificial Sequence
  Synthetic
  misc_feature (1)..(1): deoxy
  misc_feature (2)..(5): 2'-deoxy-2'-fluoro
  misc_feature (6)..(7): deoxy
  misc_feature (8)..(9): 2'-deoxy-2'-fluoro
  misc_feature (10)..(10): deoxy
  misc_feature (11)..(11): 2'-deoxy-2'-fluoro
  misc_feature (12)..(12): deoxy
  misc_feature (13)..(13): 2'-deoxy-2'-fluoro
  misc_feature (14)..(14): deoxy
  misc_feature (15)..(16): 2'-deoxy-2'-fluoro
  misc_feature (17)..(17): deoxy
  misc_feature (18)..(19): 2'-deoxy-2'-fluoro
  misc_feature (20)..(21): phosphorothioate linkage
aucuuagccauacaucacctt

SEQ ID NO: 1992 - DNA, 21 bp, Artificial Sequence
  Synthetic
  misc_feature (1)..(2): deoxy
  misc_feature (3)..(3): 2'-deoxy-2'-fluoro
  misc_feature (4)..(5): deoxy
  misc_feature (6)..(6): 2'-deoxy-2'-fluoro
  misc_feature (7)..(8): deoxy
  misc_feature (9)..(12): 2'-deoxy-2'-fluoro
  misc_feature (13)..(14): deoxy
  misc_feature (15)..(15): 2'-deoxy-2'-fluoro
  misc_feature (16)..(18): deoxy
  misc_feature (19)..(19): 2'-deoxy-2'-fluoro
  misc_feature (20)..(21): phosphorothioate linkage
aacgauagcuccaacgagctt

SEQ ID NO: 1993 - DNA, 21 bp, Artificial Sequence
  Synthetic
  misc_feature (1)..(6): deoxy
  misc_feature (7)..(9): 2'-deoxy-2'-fluoro
  misc_feature (9)..(9): deoxy
  misc_feature (11)..(11): 2'-deoxy-2'-fluoro
  misc_feature (12)..(13): deoxy
  misc_feature (14)..(19): 2'-deoxy-2'-fluoro
  misc_feature (20)..(21): phosphorothioate linkage
aaaagaccuacggucccuctt

SEQ ID NO: 1994 - DNA, 21 bp, Artificial Sequence
  Synthetic
  misc_feature (1)..(3): deoxy
  misc_feature (4)..(4): 2'-deoxy-2'-fluoro
  misc_feature (5)..(6): deoxy
  misc_feature (7)..(7): 2'-deoxy-2'-fluoro
  misc_feature (8)..(9): deoxy
  misc_feature (10)..(13): 2'-deoxy-2'-fluoro
  misc_feature (14)..(15): deoxy
  misc_feature (16)..(16): 2'-deoxy-2'-fluoro
  misc_feature (17)..(19): deoxy
  misc_feature (20)..(21): phosphorothioate linkage
aaacgauagcuccaacgagtt

SEQ ID NO: 1995 - DNA, 21 bp, Artificial Sequence
  Synthetic
  misc_feature (1)..(2): deoxy
  misc_feature (3)..(5): 2'-deoxy-2'-fluoro
  misc_feature (6)..(7): deoxy
  misc_feature (8)..(8): 2'-deoxy-2'-fluoro
  misc_feature (9)..(12): deoxy
  misc_feature (13)..(13): 2'-deoxy-2'-fluoro
  misc_feature (14)..(14): deoxy
  misc_feature (15)..(15): 2'-deoxy-2'-fluoro
  misc_feature (16)..(18): deoxy
  misc_feature (19)..(19): 2'-deoxy-2'-fluoro
  misc_feature (20)..(21): phosphorothioate linkage
aguucaauaagacgcaaactt

SEQ ID NO: 1996 - DNA, 21 bp, Artificial Sequence
  Synthetic
  misc_feature (1)..(2): 2'-deoxy-2'-fluoro
  misc_feature (3)..(4): deoxy
  misc_feature (5)..(6): 2'-deoxy-2'-fluoro
  misc_feature (7)..(10): deoxy
  misc_feature (11)..(11): 2'-deoxy-2'-fluoro
  misc_feature (12)..(14): deoxy
  misc_feature (15)..(16): 2'-deoxy-2'-fluoro
  misc_feature (17)..(17): deoxy
  misc_feature (18)..(19): 2'-deoxy-2'-fluoro
  misc_feature (20)..(21): phosphorothioate linkage
ucaaucagaauaaaccguctt

SEQ ID NO: 1997 - DNA, 21 bp, Artificial Sequence
  Synthetic
  misc_feature (1)..(1): 5'-3 attached inverted deoxyabasic moiety.
  misc_feature (1)..(1): 2'-O-methyl
  misc_feature (2)..(3): 2'-deoxy-2'-fluoro
  misc_feature (4)..(4): 2'-O-methyl
  misc_feature (5)..(5): 2'-deoxy-2'-fluoro
  misc_feature (6)..(7): 2'-O-methyl
  misc_feature (8)..(9): 2'-deoxy-2'-fluoro
  misc_feature (10)..(13): 2'-O-methyl
  misc_feature (14)..(14): 2'-deoxy-2'-fluoro
  misc_feature (15)..(15): 2'-O-methyl
  misc_feature (16)..(19): 2'-deoxy-2'-fluoro
  misc_feature (21)..(21): 3'-3 attached inverted deoxyabasic moiety.
guuacgaucggaaugcuuutt

SEQ ID NO: 1998 - DNA, 21 bp, Artificial Sequence
  Synthetic
  misc_feature (1)..(1): 5'-3 attached inverted deoxyabasic moiety.
  misc_feature (1)..(2): 2'-O-methyl
  misc_feature (3)..(4): 2'-deoxy-2'-fluoro
  misc_feature (5)..(7): 2'-O-methyl
  misc_feature (8)..(9): 2'-deoxy-2'-fluoro
  misc_feature (10)..(10): 2'-O-methyl
  misc_feature (11)..(12): 2'-deoxy-2'-fluoro
  misc_feature (13)..(15): 2'-O-methyl
  misc_feature (16)..(18): 2'-deoxy-2'-fluoro
  misc_feature (19)..(19): 2'-O-methyl
  misc_feature (21)..(21): 3'-3 attached inverted deoxyabasic moiety.
ggccgagcugccgaauucatt

SEQ ID NO: 1999 - DNA, 21 bp, Artificial Sequence
  Synthetic
  misc_feature (1)..(1): 5'-3 attached inverted deoxyabasic moiety.
  misc_feature (1)..(2): 2'-O-methyl
  misc_feature (3)..(3): 2'-deoxy-2'-fluoro
  misc_feature (4)..(5): 2'-O-methyl
  misc_feature (6)..(6): 2'-deoxy-2'-fluoro
  misc_feature (7)..(7): 2'-O-methyl
  misc_feature (8)..(8): 2'-deoxy-2'-fluoro
  misc_feature (9)..(9): 2'-O-methyl
  misc_feature (10)..(10): 2'-deoxy-2'-fluoro
  misc_feature (11)..(12): 2'-O-methyl
  misc_feature (13)..(14): 2'-deoxy-2'-fluoro
  misc_feature (15)..(18): 2'-O-methyl
  misc_feature (19)..(19): 2'-deoxy-2'-fluoro
  misc_feature (21)..(21): 3'-3 attached inverted deoxyabasic moiety.
ggugauguauggcuaagautt

SEQ ID NO: 2000 - DNA, 21 bp, Artificial Sequence
  Synthetic
  misc_feature (1)..(1): 5'-3 attached inverted deoxyabasic moiety.
  misc_feature (1)..(1): 2'-O-methyl
  misc_feature (2)..(4): 2'-deoxy-2'-fluoro
  misc_feature (5)..(5): 2'-O-methyl
  misc_feature (6)..(7): 2'-deoxy-2'-fluoro
  misc_feature (8)..(11): 2'-O-methyl
  misc_feature (12)..(13): 2'-deoxy-2'-fluoro
  misc_feature (14)..(14): 2'-O-methyl
  misc_feature (15)..(16): 2'-deoxy-2'-fluoro
  misc_feature (17)..(17): 2'-O-methyl
  misc_feature (18)..(19): 2'-deoxy-2'-fluoro
  misc_feature (21)..(21): 3'-3 attached inverted deoxyabasic moiety.
gcucguuggagcuaucguutt

SEQ ID NO: 2001 - DNA, 21 bp, Artificial Sequence
  Synthetic
  misc_feature (1)..(1): 5'-3 attached inverted deoxyabasic moiety.
  misc_feature (1)..(6): 2'-O-methyl
  misc_feature (7)..(8): 2'-deoxy-2'-fluoro
  misc_feature (9)..(9): 2'-O-methyl
  misc_feature (10)..(10): 2'-deoxy-2'-fluoro
  misc_feature (11)..(13): 2'-O-methyl
  misc_feature (14)..(19): 2'-deoxy-2'-fluoro
  misc_feature (21)..(21): 3'-3 attached inverted deoxyabasic moiety.
gagggaccguaggucuuuutt

SEQ ID NO: 2002 - DNA, 21 bp, Artificial Sequence
  Synthetic
  misc_feature (1)..(1): 5'-3 attached inverted deoxyabasic moiety.
  misc_feature (1)..(3): 2'-deoxy-2'-fluoro
  misc_feature (4)..(4): 2'-O-methyl
  misc_feature (5)..(6): 2'-deoxy-2'-fluoro
  misc_feature (7)..(10): 2'-O-methyl
  misc_feature (11)..(12): 2'-deoxy-2'-fluoro
  misc_feature (13)..(13): 2'-O-methyl
  misc_feature (14)..(15): 2'-deoxy-2'-fluoro
  misc_feature (16)..(16): 2'-O-methyl
  misc_feature (17)..(19): 2'-deoxy-2'-fluoro
  misc_feature (21)..(21): 3'-3 attached inverted deoxyabasic moiety.
cucguuggagcuaucguuutt

SEQ ID NO: 2003 - DNA, 21 bp, Artificial Sequence
  Synthetic
  misc_feature (1)..(1): 5'-3 attached inverted deoxyabasic moiety.
  misc_feature (1)..(1): 2'-O-methyl
  misc_feature (2)..(4): 2'-deoxy-2'-fluoro
  misc_feature (5)..(5): 2'-O-methyl
  misc_feature (6)..(6): 2'-deoxy-2'-fluoro
  misc_feature (7)..(7): 2'-O-methyl
  misc_feature (8)..(11): 2'-deoxy-2'-fluoro
  misc_feature (12)..(12): 2'-O-methyl
  misc_feature (13)..(14): 2'-deoxy-2'-fluoro
  misc_feature (15)..(17): 2'-O-methyl
  misc_feature (18)..(19): 2'-deoxy-2'-fluoro
  misc_feature (21)..(21): 3'-3 attached inverted deoxyabasic moiety.
guuugcgucuuauugaacutt

SEQ ID NO: 2004 - DNA, 21 bp, Artificial Sequence
  Synthetic
  misc_feature (1)..(1): 5'-3 attached inverted deoxyabasic moiety.
  misc_feature (1)..(2): 2'-O-methyl
  misc_feature (3)..(3): 2'-deoxy-2'-fluoro
  misc_feature (4)..(5): 2'-O-methyl
  misc_feature (6)..(8): 2'-deoxy-2'-fluoro
  misc_feature (9)..(9): 2'-O-methyl
  misc_feature (10)..(13): 2'-deoxy-2'-fluoro
  misc_feature (14)..(15): 2'-O-methyl
  misc_feature (16)..(17): 2'-deoxy-2'-fluoro
  misc_feature (16)..(17)
  misc_feature (18)..(19): 2'-O-methyl
  misc_feature (21)..(21): 3'-3 attached inverted deoxyabasic moiety.
gacgguuuauucugauugatt

SEQ ID NO: 2005 - DNA, 21 bp, Artificial Sequence
  Synthetic
  misc_feature (1)..(4): 2'-O-methyl
  misc_feature (5)..(5): 2'-deoxy-2'-fluoro
  misc_feature (6)..(6): 2'-O-methyl
  misc_feature (7)..(10): 2'-deoxy-2'-fluoro
  misc_feature (11)..(12): 2'-O-methyl
  misc_feature (13)..(14): 2'-deoxy-2'-fluoro
  misc_feature (15)..(15): 2'-O-methyl
  misc_feature (16)..(16): 2'-deoxy-2'-fluoro
  misc_feature (17)..(18): 2'-O-methyl
  misc_feature (19)..(19): 2'-deoxy-2'-fluoro
  misc_feature (20)..(21): phosphorothioate linkage
aaagcauuccgaucguaactt

SEQ ID NO: 2006 - DNA, 21 bp, Artificial Sequence
  Synthetic
  misc_feature (1)..(1): 2'-deoxy-2'-fluoro
  misc_feature (2)..(4): 2'-O-methyl
  misc_feature (5)..(7): 2'-deoxy-2'-fluoro
  misc_feature (8)..(9): 2'-O-methyl
  misc_feature (10)..(10): 2'-deoxy-2'-fluoro
  misc_feature (11)..(12): 2'-O-methyl
  misc_feature (13)..(15): 2'-deoxy-2'-fluoro
  misc_feature (16)..(17): 2'-O-methyl
  misc_feature (18)..(19): 2'-deoxy-2'-fluoro
ugaauucggcagcucggcctt

SEQ ID NO: 2007 - DNA, 21 bp, Artificial Sequence
  Synthetic
  misc_feature (1)..(1): 2'-O-methyl
  misc_feature (2)..(5): 2'-deoxy-2'-fluoro
  misc_feature (6)..(7): 2'-O-methyl
  misc_feature (8)..(9): 2'-deoxy-2'-fluoro
  misc_feature (10)..(10): 2'-O-methyl
  misc_feature (11)..(11): 2'-deoxy-2'-fluoro
  misc_feature (12)..(12): 2'-O-methyl
  misc_feature (13)..(13): 2'-deoxy-2'-fluoro
  misc_feature (14)..(14): 2'-O-methyl
  misc_feature (15)..(16): 2'-deoxy-2'-fluoro
  misc_feature (17)..(17): 2'-O-methyl
  misc_feature (18)..(19): 2'-deoxy-2'-fluoro
  misc_feature (20)..(21): phosphorothioate linkage
aucuuagccauacaucacctt

SEQ ID NO: 2008 - DNA, 21 bp, Artificial Sequence
  Synthetic
  misc_feature (1)..(2): 2'-O-methyl
  misc_feature (3)..(3): 2'-deoxy-2'-fluoro
  misc_feature (4)..(5): 2'-O-methyl
  misc_feature (6)..(6): 2'-deoxy-2'-fluoro
  misc_feature (7)..(8): 2'-O-methyl
  misc_feature (9)..(12): 2'-deoxy-2'-fluoro
  misc_feature (13)..(14): 2'-O-methyl
  misc_feature (15)..(15): 2'-deoxy-2'-fluoro
  misc_feature (16)..(18): 2'-O-methyl
  misc_feature (19)..(19): 2'-deoxy-2'-fluoro
  misc_feature (20)..(21): phosphorothioate linkage
aacgauagcuccaacgagctt

SEQ ID NO: 2009 - DNA, 21 bp, Artificial Sequence
  Synthetic
  misc_feature (1)..(6): 2'-O-methyl
  misc_feature (7)..(9): 2'-deoxy-2'-fluoro
  misc_feature (10)..(10): 2'-O-methyl
  misc_feature (11)..(11): 2'-deoxy-2'-fluoro
  misc_feature (12)..(13): 2'-O-methyl
  misc_feature (14)..(19): 2'-deoxy-2'-fluoro
  misc_feature (20)..(21): phosphorothioate linkage
aaaagaccuacggucccuctt

SEQ ID NO: 2010 - DNA, 21 bp, Artificial Sequence
  Synthetic
  misc_feature (1)..(3): 2'-O-methyl
  misc_feature (4)..(4): 2'-deoxy-2'-fluoro
  misc_feature (5)..(6): 2'-O-methyl
  misc_feature (7)..(7): 2'-deoxy-2'-fluoro
  misc_feature (8)..(9): 2'-O-methyl
  misc_feature (10)..(13): 2'-deoxy-2'-fluoro
  misc_feature (14)..(15): 2'-O-methyl
  misc_feature (16)..(16): 2'-deoxy-2'-fluoro
  misc_feature (17)..(19): 2'-O-methyl
  misc_feature (20)..(21): phosphorothioate linkage
aaacgauagcuccaacgagtt

SEQ ID NO: 2011 - DNA, 21 bp, Artificial Sequence
  Synthetic
  misc_feature (1)..(2): 2'-O-methyl
  misc_feature (3)..(5): 2'-deoxy-2'-fluoro
  misc_feature (6)..(7): 2'-O-methyl
  misc_feature (8)..(8): 2'-deoxy-2'-fluoro
  misc_feature (9)..(12): 2'-O-methyl
  misc_feature (13)..(13): 2'-deoxy-2'-fluoro
  misc_feature (14)..(14): 2'-O-methyl
  misc_feature (15)..(15): 2'-deoxy-2'-fluoro
  misc_feature (16)..(18): 2'-O-methyl
  misc_feature (19)..(19): 2'-deoxy-2'-fluoro
  misc_feature (20)..(21): phosphorothioate linkage
aguucaauaagacgcaaactt

SEQ ID NO: 2012 - DNA, 21 bp, Artificial Sequence
  Synthetic
  misc_feature (1)..(2): 2'-deoxy-2'-fluoro
  misc_feature (3)..(4): 2'-O-methyl
  misc_feature (5)..(6): 2'-deoxy-2'-fluoro
  misc_feature (7)..(10): 2'-O-methyl
  misc_feature (11)..(11): 2'-deoxy-2'-fluoro
  misc_feature (12)..(14): 2'-O-methyl
  misc_feature (15)..(16): 2'-deoxy-2'-fluoro
  misc_feature (17)..(17): 2'-O-methyl
  misc_feature (18)..(19): 2'-deoxy-2'-fluoro
  misc_feature (20)..(21): phosphorothioate linkage
ucaaucagaauaaaccguctt

SEQ ID NO: 2013 - DNA, 21 bp, Artificial Sequence
  Synthetic
  misc_feature (1)..(1): 5'-3 attached inverted deoxyabasic moiety.
  misc_feature (21)..(21): 3'-3 attached inverted deoxyabasic moiety.
guuacgaucggaaugcuuutt

SEQ ID NO: 2014 - DNA, 21 bp, Artificial Sequence
  Synthetic
  misc_feature (1)..(1): 5'-3 attached inverted deoxyabasic moiety.
  misc_feature (21)..(21): 3'-3 attached inverted deoxyabasic moiety.
ggccgagcugccgaauucatt

SEQ ID NO: 2015 - DNA, 21 bp, Artificial Sequence
  Synthetic
  misc_feature (1)..(1): 5'-3 attached inverted deoxyabasic moiety.
  misc_feature (21)..(21): 3'-3 attached inverted deoxyabasic moiety.
ggugauguauggcuaagautt

SEQ ID NO: 2016 - DNA, 21 bp, Artificial Sequence
  Synthetic
  misc_feature (1)..(1): 5'-3 attached inverted deoxyabasic moiety.
  misc_feature (21)..(21): 3'-3 attached inverted deoxyabasic moiety.
gcucguuggagcuaucguutt

SEQ ID NO: 2017 - DNA, 21 bp, Artificial Sequence
  Synthetic
  misc_feature (1)..(1): 5'-3 attached inverted deoxyabasic moiety.
  misc_feature (21)..(21): 3'-3 attached inverted deoxyabasic moiety.
gagggaccguaggucuuuutt

SEQ ID NO: 2018 - DNA, 21 bp, Artificial Sequence
  Synthetic
  misc_feature (1)..(1): 5'-3 attached inverted deoxyabasic moiety.
  misc_feature (21)..(21): 3'-3 attached inverted deoxyabasic moiety.
cucguuggagcuaucguuutt

SEQ ID NO: 2019 - DNA, 21 bp, Artificial Sequence
  Synthetic
  misc_feature (1)..(1): 5'-3 attached inverted deoxyabasic moiety.
  misc_feature (21)..(21): 3'-3 attached inverted deoxyabasic moiety.
guuugcgucuuauugaacutt

SEQ ID NO: 2020 - DNA, 21 bp, Artificial Sequence
  Synthetic
  misc_feature (1)..(1): 5'-3 attached inverted deoxyabasic moiety.
  misc_feature (21)..(21): 3'-3 attached inverted deoxyabasic moiety.
gacgguuuauucugauugatt

SEQ ID NO: 2021 - DNA, 21 bp, Artificial Sequence
  Synthetic
  misc_feature (20)..(21): phosphorothioate linkage
aaagcauuccgaucguaactt

SEQ ID NO: 2022 - DNA, 21 bp, Artificial Sequence
  Synthetic
  misc_feature (20)..(21): phosphorothioate linkage
ugaauucggcagcucggcctt

SEQ ID NO: 2023 - DNA, 21 bp, Artificial Sequence
  Synthetic
  misc_feature (20)..(21): phosphorothioate linkage
aucuuagccauacaucacctt

SEQ ID NO: 2024 - DNA, 21 bp, Artificial Sequence
  Synthetic
  misc_feature (20)..(21): phosphorothioate linkage
aacgauagcuccaacgagctt

SEQ ID NO: 2025 - DNA, 21 bp, Artificial Sequence
  Synthetic
  misc_feature (20)..(21): phosphorothioate linkage
aaaagaccuacggucccuctt

SEQ ID NO: 2026 - DNA, 21 bp, Artificial Sequence
  Synthetic
  misc_feature (20)..(21): phosphorothioate linkage
aaacgauagcuccaacgagtt

SEQ ID NO: 2027 - DNA, 21 bp, Artificial Sequence
  Synthetic
  misc_feature (20)..(21): phosphorothioate linkage
aguucaauaagacgcaaactt

SEQ ID NO: 2028 - DNA, 21 bp, Artificial Sequence
  Synthetic
  misc_feature (20)..(21): phosphorothioate linkage
ucaaucagaauaaaccguctt

SEQ ID NO: 2029 - DNA, 21 bp, Artificial Sequence
  Synthetic
  misc_feature (1)..(4): 2'-O-methyl
  misc_feature (5)..(5): 2'-deoxy-2'-fluoro
  misc_feature (6)..(6): 2'-O-methyl
  misc_feature (7)..(10): 2'-deoxy-2'-fluoro
  misc_feature (11)..(12): 2'-O-methyl
  misc_feature (13)..(14): 2'-deoxy-2'-fluoro
  misc_feature (15)..(15): 2'-O-methyl
  misc_feature (16)..(16): 2'-deoxy-2'-fluoro
  misc_feature (17)..(18): 2'-O-methyl
  misc_feature (21)..(21): 3'-3 attached inverted deoxyabasic moiety.
aaagcauuccgaucguaactt

SEQ ID NO: 2030 - DNA, 21 bp, Artificial Sequence
  Synthetic
  misc_feature (1)..(1): 2'-deoxy-2'-fluoro
  misc_feature (2)..(4): 2'-O-methyl
  misc_feature (5)..(7): 2'-deoxy-2'-fluoro
  misc_feature (8)..(9): 2'-O-methyl
  misc_feature (10)..(10): 2'-deoxy-2'-fluoro
  misc_feature (11)..(12): 2'-O-methyl
  misc_feature (13)..(15): 2'-deoxy-2'-fluoro
  misc_feature (16)..(17): 2'-O-methyl
  misc_feature (18)..(19): 2'-deoxy-2'-fluoro
  misc_feature (21)..(21): 3'-3 attached inverted deoxyabasic moiety.
ugaauucggcagcucggcctt

SEQ ID NO: 2031 - DNA, 21 bp, Artificial Sequence
  Synthetic
  misc_feature (1)..(1): 2'-O-methyl
  misc_feature (2)..(5): 2'-deoxy-2'-fluoro
  misc_feature (6)..(7): 2'-O-methyl
  misc_feature (8)..(9): 2'-deoxy-2'-fluoro
  misc_feature (10)..(10): 2'-O-methyl
  misc_feature (11)..(11): 2'-deoxy-2'-fluoro
  misc_feature (12)..(12): 2'-O-methyl
  misc_feature (13)..(13): 2'-deoxy-2'-fluoro
  misc_feature (14)..(14): 2'-O-methyl
  misc_feature (15)..(16): 2'-deoxy-2'-fluoro
  misc_feature (17)..(17): 2'-O-methyl
  misc_feature (18)..(19): 2'-deoxy-2'-fluoro
  misc_feature (21)..(21): 3'-3 attached inverted deoxyabasic moiety.
aucuuagccauacaucacctt

SEQ ID NO: 2032 - DNA, 21 bp, Artificial Sequence
  Synthetic
  misc_feature (1)..(2): 2'-O-methyl
  misc_feature (3)..(3): 2'-deoxy-2'-fluoro
  misc_feature (4)..(5): 2'-O-methyl
  misc_feature (6)..(6): 2'-deoxy-2'-fluoro
  misc_feature (7)..(8): 2'-O-methyl
  misc_feature (9)..(12): 2'-deoxy-2'-fluoro
  misc_feature (13)..(14): 2'-O-methyl
  misc_feature (15)..(15): 2'-deoxy-2'-fluoro
  misc_feature (16)..(18): 2'-O-methyl
  misc_feature (19)..(19): 2'-deoxy-2'-fluoro
  misc_feature (21)..(21): 3'-3 attached inverted deoxyabasic moiety.
aacgauagcuccaacgagctt

SEQ ID NO: 2033 - DNA, 21 bp, Artificial Sequence
  Synthetic
  misc_feature (1)..(6): 2'-O-methyl
  misc_feature (7)..(9): 2'-deoxy-2'-fluoro
  misc_feature (10)..(10): 2'-O-methyl
  misc_feature (11)..(11): 2'-deoxy-2'-fluoro
  misc_feature (12)..(13): 2'-O-methyl
  misc_feature (14)..(19): 2'-deoxy-2'-fluoro
  misc_feature (21)..(21): 3'-3 attached inverted deoxyabasic moiety.
aaaagaccuacggucccuctt

SEQ ID NO: 2034 - DNA, 21 bp, Artificial Sequence
  Synthetic
  misc_feature (1)..(3): 2'-O-methyl
  misc_feature (4)..(4): 2'-deoxy-2'-fluoro
  misc_feature (5)..(6): 2'-O-methyl
  misc_feature (7)..(7): 2'-deoxy-2'-fluoro
  misc_feature (8)..(9): 2'-O-methyl
  misc_feature (10)..(13): 2'-deoxy-2'-fluoro
  misc_feature (14)..(15): 2'-O-methyl
  misc_feature (16)..(16): 2'-deoxy-2'-fluoro
  misc_feature (17)..(19): 2'-O-methyl
  misc_feature (21)..(21): 3'-3 attached inverted deoxyabasic moiety.
aaacgauagcuccaacgagtt

SEQ ID NO: 2035 - DNA, 21 bp, Artificial Sequence
  Synthetic
  misc_feature (1)..(2): 2'-O-methyl
  misc_feature (3)..(5): 2'-deoxy-2'-fluoro
  misc_feature (6)..(7): 2'-O-methyl
  misc_feature (8)..(8): 2'-deoxy-2'-fluoro
  misc_feature (9)..(12): 2'-O-methyl
  misc_feature (13)..(13): 2'-deoxy-2'-fluoro
  misc_feature (14)..(14): 2'-O-methyl
  misc_feature (15)..(15): 2'-deoxy-2'-fluoro
  misc_feature (16)..(18): 2'-O-methyl
  misc_feature (19)..(19): 2'-deoxy-2'-fluoro
  misc_feature (21)..(21): 3'-3 attached inverted deoxyabasic moiety.
aguucaauaagacgcaaactt

SEQ ID NO: 2036 - DNA, 21 bp, Artificial Sequence
  Synthetic
  misc_feature (1)..(2): 2'-deoxy-2'-fluoro
  misc_feature (3)..(4): 2'-O-methyl
  misc_feature (5)..(6): 2'-deoxy-2'-fluoro
  misc_feature (7)..(10): 2'-O-methyl
  misc_feature (11)..(11): 2'-deoxy-2'-fluoro
  misc_feature (12)..(14): 2'-O-methyl
  misc_feature (15)..(16): 2'-deoxy-2'-fluoro
  misc_feature (17)..(17): 2'-O-methyl
  misc_feature (18)..(19): 2'-deoxy-2'-fluoro
  misc_feature (21)..(21): 3'-3 attached inverted deoxyabasic moiety.
ucaaucagaauaaaccguctt

SEQ ID NO: 2037 - DNA, 21 bp, Artificial Sequence
  Synthetic
  misc_feature (21)..(21): 3'-3 attached inverted deoxyabasic moiety.
aaagcauuccgaucguaactt

SEQ ID NO: 2038 - DNA, 21 bp, Artificial Sequence
  Synthetic
  misc_feature (21)..(21): 3'-3 attached inverted deoxyabasic moiety.
ugaauucggcagcucggcctt

SEQ ID NO: 2039 - DNA, 21 bp, Artificial Sequence
  Synthetic
  misc_feature (21)..(21): 3'-3 attached inverted deoxyabasic moiety.
aucuuagccauacaucacctt

SEQ ID NO: 2040 - DNA, 21 bp, Artificial Sequence
  Synthetic
  misc_feature (21)..(21): 3'-3 attached inverted deoxyabasic moiety.
aacgauagcuccaacgagctt

SEQ ID NO: 2041 - DNA, 21 bp, Artificial Sequence
  Synthetic
  misc_feature (21)..(21): 3'-3 attached inverted deoxyabasic moiety.
aaaagaccuacggucccuctt

SEQ ID NO: 2042 - DNA, 21 bp, Artificial Sequence
  Synthetic
  misc_feature (21)..(21): 3'-3 attached inverted deoxyabasic moiety.
aaacgauagcuccaacgagtt

SEQ ID NO: 2043 - DNA, 21 bp, Artificial Sequence
  Synthetic
  misc_feature (21)..(21): 3'-3 attached inverted deoxyabasic moiety.
aguucaauaagacgcaaactt

SEQ ID NO: 2044 - DNA, 21 bp, Artificial Sequence
  Synthetic
  misc_feature (21)..(21): 3'-3 attached inverted deoxyabasic moiety.
ucaaucagaauaaaccguctt

SEQ ID NO: 2045 - DNA, 21 bp, Artificial Sequence
  Synthetic
  misc_feature (4)..(4): 2'-O-methyl
  misc_feature (5)..(5): 2'-deoxy-2'-fluoro
  misc_feature (6)..(6): 2'-O-methyl
  misc_feature (7)..(10): 2'-deoxy-2'-fluoro
  misc_feature (11)..(12): 2'-O-methyl
  misc_feature (13)..(14): 2'-deoxy-2'-fluoro
  misc_feature (15)..(15): 2'-O-methyl
  misc_feature (16)..(16): 2'-deoxy-2'-fluoro
  misc_feature (17)..(18): 2'-O-methyl
  misc_feature (19)..(19): 2'-deoxy-2'-fluoro
  misc_feature (20)..(21): phosphorothioate linkage
aaagcauuccgaucguaactt

SEQ ID NO: 2046 - DNA, 21 bp, Artificial Sequence
  Synthetic
  misc_feature (4)..(4): 2'-O-methyl
  misc_feature (5)..(7): 2'-deoxy-2'-fluoro
  misc_feature (8)..(9): 2'-O-methyl
  misc_feature (10)..(10): 2'-deoxy-2'-fluoro
  misc_feature (11)..(12): 2'-O-methyl
  misc_feature (13)..(15): 2'-deoxy-2'-fluoro
  misc_feature (16)..(17): 2'-O-methyl
  misc_feature (18)..(19): 2'-deoxy-2'-fluoro
  misc_feature (20)..(21): phosphorothioate linkage
ugaauucggcagcucggcctt

SEQ ID NO: 2047 - DNA, 21 bp, Artificial Sequence
  Synthetic
  misc_feature (4)..(5): 2'-deoxy-2'-fluoro
  misc_feature (6)..(7): 2'-O-methyl
  misc_feature (8)..(9): 2'-deoxy-2'-fluoro
  misc_feature (10)..(10): 2'-O-methyl
  misc_feature (11)..(11): 2'-deoxy-2'-fluoro
  misc_feature (12)..(12): 2'-O-methyl
  misc_feature (13)..(13): 2'-deoxy-2'-fluoro
  misc_feature (14)..(14): 2'-O-methyl
  misc_feature (15)..(16): 2'-deoxy-2'-fluoro
  misc_feature (17)..(17): 2'-O-methyl
  misc_feature (18)..(19): 2'-deoxy-2'-fluoro
  misc_feature (20)..(21): phosphorothioate linkage
aucuuagccauacaucacctt

SEQ ID NO: 2048 - DNA, 21 bp, Artificial Sequence
  Synthetic
  misc_feature (4)..(5): 2'-O-methyl
  misc_feature (6)..(6): 2'-deoxy-2'-fluoro
  misc_feature (7)..(8): 2'-O-methyl
  misc_feature (9)..(12): 2'-deoxy-2'-fluoro
  misc_feature (13)..(14): 2'-O-methyl
  misc_feature (15)..(15): 2'-deoxy-2'-fluoro
  misc_feature (16)..(18): 2'-O-methyl
  misc_feature (19)..(19): 2'-deoxy-2'-fluoro
  misc_feature (20)..(21): phosphorothioate linkage
aacgauagcuccaacgagctt

SEQ ID NO: 2049 - DNA, 21 bp, Artificial Sequence
  Synthetic
  misc_feature (4)..(6): 2'-O-methyl
  misc_feature (7)..(9): 2'-deoxy-2'-fluoro
  misc_feature (10)..(10): 2'-O-methyl
  misc_feature (11)..(11): 2'-deoxy-2'-fluoro
  misc_feature (12)..(13): 2'-O-methyl
  misc_feature (14)..(19): 2'-deoxy-2'-fluoro
  misc_feature (20)..(21): phosphorothioate linkage
aaaagaccuacggucccuctt

SEQ ID NO: 2050 - DNA, 21 bp, Artificial Sequence
  Synthetic
  misc_feature (4)..(4): 2'-deoxy-2'-fluoro
  misc_feature (5)..(6): 2'-O-methyl
  misc_feature (7)..(7): 2'-deoxy-2'-fluoro
  misc_feature (8)..(9): 2'-O-methyl
  misc_feature (10)..(13): 2'-deoxy-2'-fluoro
  misc_feature (14)..(15): 2'-O-methyl
  misc_feature (16)..(16): 2'-deoxy-2'-fluoro
  misc_feature (17)..(19): 2'-O-methyl
  misc_feature (20)..(21): phosphorothioate linkage
aaacgauagcuccaacgagtt

SEQ ID NO: 2051 - DNA, 21 bp, Artificial Sequence
  Synthetic
  misc_feature (4)..(5): 2'-deoxy-2'-fluoro
  misc_feature (6)..(7): 2'-O-methyl
  misc_feature (8)..(8): 2'-deoxy-2'-fluoro
  misc_feature (9)..(12): 2'-O-methyl
  misc_feature (13)..(13): 2'-deoxy-2'-fluoro
  misc_feature (14)..(14): 2'-O-methyl
  misc_feature (15)..(15): 2'-deoxy-2'-fluoro
  misc_feature (16)..(18): 2'-O-methyl
  misc_feature (19)..(19): 2'-deoxy-2'-fluoro
  misc_feature (20)..(21): phosphorothioate linkage
aguucaauaagacgcaaactt

SEQ ID NO: 2052 - DNA, 21 bp, Artificial Sequence
  Synthetic
  misc_feature (4)..(4): 2'-O-methyl
  misc_feature (5)..(6): 2'-deoxy-2'-fluoro
  misc_feature (7)..(10): 2'-O-methyl
  misc_feature (11)..(11): 2'-deoxy-2'-fluoro
  misc_feature (12)..(14): 2'-O-methyl
  misc_feature (15)..(16): 2'-deoxy-2'-fluoro
  misc_feature (17)..(17): 2'-O-methyl
  misc_feature (18)..(19): 2'-deoxy-2'-fluoro
  misc_feature (20)..(21): phosphorothioate linkage
ucaaucagaauaaaccguctt

SEQ ID NO: 2053 - RNA, 19 nt, Artificial Sequence
  Synthetic
aauguuguuguugguggcg

SEQ ID NO: 2054 - RNA, 19 nt, Artificial Sequence
  Synthetic
ggcggcgagcggagccgga

SEQ ID NO: 2055 - RNA, 19 nt, Artificial Sequence
  Synthetic
aggagccgccgcaaagaug

SEQ ID NO: 2056 - RNA, 19 nt, Artificial Sequence
  Synthetic
ggaggagccgucgaggagg

SEQ ID NO: 2057 - RNA, 19 nt, Artificial Sequence
  Synthetic
gugcugccgccgcugccgc

SEQ ID NO: 2058 - RNA, 19 nt, Artificial Sequence
  Synthetic
ccgccgcugcugccgccgc

SEQ ID NO: 2059 - RNA, 19 nt, Artificial Sequence
  Synthetic
ccgcccgcgaagccggagc

SEQ ID NO: 2060 - RNA, 19 nt, Artificial Sequence
  Synthetic
cucgagccgcagcggggau

SEQ ID NO: 2061 - RNA, 19 nt, Artificial Sequence
  Synthetic
ugccguucugagugccuga

SEQ ID NO: 2062 - RNA, 19 nt, Artificial Sequence
  Synthetic
acugccucgccccgaagga

SEQ ID NO: 2063 - RNA, 19 nt, Artificial Sequence
  Synthetic
auggccucggaugggcauu

SEQ ID NO: 2064 - RNA, 19 nt, Artificial Sequence
  Synthetic
uagaggcacggcggccccg

SEQ ID NO: 2065 - RNA, 19 nt, Artificial Sequence
  Synthetic
gggcucccgucccguccgu

SEQ ID NO: 2066 - RNA, 19 nt, Artificial Sequence
  Synthetic
ucugucuguuaucgucugu

SEQ ID NO: 2067 - RNA, 19 nt, Artificial Sequence
  Synthetic
ucucucuugacaucaccgc

SEQ ID NO: 2068 - RNA, 19 nt, Artificial Sequence
  Synthetic
cagcuccacccccucccgu

SEQ ID NO: 2069 - RNA, 19 nt, Artificial Sequence
  Synthetic
ucccagcccccaacgccag

SEQ ID NO: 2070 - RNA, 19 nt, Artificial Sequence
  Synthetic
gcuuccugcaggcccagag

SEQ ID NO: 2071 - RNA, 19 nt, Artificial Sequence
  Synthetic
gccggcaugaacucuccca

SEQ ID NO: 2072 - RNA, 19 nt, Artificial Sequence
  Synthetic
aacgagucggaugggaugu

SEQ ID NO: 2073 - RNA, 19 nt, Artificial Sequence
  Synthetic
ucaggucgggaaccauccu

SEQ ID NO: 2074 - RNA, 19 nt, Artificial Sequence
  Synthetic
uuggaaauccugccgcgga

SEQ ID NO: 2075 - RNA, 19 nt, Artificial Sequence
  Synthetic
acuucucugcacagcaucc

SEQ ID NO: 2076 - RNA, 19 nt, Artificial Sequence
  Synthetic
ccugugacaguggagguga

SEQ ID NO: 2077 - RNA, 19 nt, Artificial Sequence
  Synthetic
aagccggugcugccaagag

SEQ ID NO: 2078 - RNA, 19 nt, Artificial Sequence
  Synthetic
gccaugcccaguuccaugg

SEQ ID NO: 2079 - RNA, 19 nt, Artificial Sequence
  Synthetic
ggggguggggguggaggca

SEQ ID NO: 2080 - RNA, 19 nt, Artificial Sequence
  Synthetic
agccccagcccuguggagc

SEQ ID NO: 2081 - RNA, 19 nt, Artificial Sequence
  Synthetic
cuacggggggcucuggugg

SEQ ID NO: 2082 - RNA, 19 nt, Artificial Sequence
  Synthetic
ggcucuguggaccccacac

SEQ ID NO: 2083 - RNA, 19 nt, Artificial Sequence
  Synthetic
cugcgggagcagcaacugc

SEQ ID NO: 2084 - RNA, 19 nt, Artificial Sequence
  Synthetic
cagcaggagcuccuggcgc

SEQ ID NO: 2085 - RNA, 19 nt, Artificial Sequence
  Synthetic
cucaagcagcagcagcagc

SEQ ID NO: 2086 - RNA, 19 nt, Artificial Sequence
  Synthetic
cugcagaagcagcuccugu

SEQ ID NO: 2087 - RNA, 19 nt, Artificial Sequence
  Synthetic
uucgcugaguuccagaaac

SEQ ID NO: 2088 - RNA, 19 nt, Artificial Sequence
  Synthetic
cagcaugaccaccugacaa

SEQ ID NO: 2089 - RNA, 19 nt, Artificial Sequence
  Synthetic
aggcagcaugagguccagc

SEQ ID NO: 2090 - RNA, 19 nt, Artificial Sequence
  Synthetic
cugcagaagcaccucaagc

SEQ ID NO: 2091 - RNA, 19 nt, Artificial Sequence
  Synthetic
cagcagcaggagaugcugg

SEQ ID NO: 2092 - RNA, 19 nt, Artificial Sequence
  Synthetic
gcagccaagcagcagcagg

SEQ ID NO: 2093 - RNA, 19 nt, Artificial Sequence
  Synthetic
gagaugcuggcagccaagc

SEQ ID NO: 2094 - RNA, 19 nt, Artificial Sequence
  Synthetic
cggcagcaggagcuggagc

SEQ ID NO: 2095 - RNA, 19 nt, Artificial Sequence
  Synthetic
cagcagcggcagcgggagc

SEQ ID NO: 2096 - RNA, 19 nt, Artificial Sequence
  Synthetic
cagcagcggcaggaagagc

SEQ ID NO: 2097 - RNA, 19 nt, Artificial Sequence
  Synthetic
cuggagaagcagcggcugg

SEQ ID NO: 2098 - RNA, 19 nt, Artificial Sequence
  Synthetic
gagcagcagcugcucaucc

SEQ ID NO: 2099 - RNA, 19 nt, Artificial Sequence
  Synthetic
cugcggaacaaggagaaga

SEQ ID NO: 2100 - RNA, 19 nt, Artificial Sequence
  Synthetic
agcaaagagagugccauug

SEQ ID NO: 2101 - RNA, 19 nt, Artificial Sequence
  Synthetic
gccagcacugagguaaagc

SEQ ID NO: 2102 - RNA, 19 nt, Artificial Sequence
  Synthetic
cugaggcuccaggaauucc

SEQ ID NO: 2103 - RNA, 19 nt, Artificial Sequence
  Synthetic
cucuugucgaagucaaagg

SEQ ID NO: 2104 - RNA, 19 nt, Artificial Sequence
  Synthetic
gagcccacaccaggcggcc

SEQ ID NO: 2105 - RNA, 19 nt, Artificial Sequence
  Synthetic
cucaaccauucccucccac

SEQ ID NO: 2106 - RNA, 19 nt, Artificial Sequence
  Synthetic
cagcaccccaaaugcuggg

SEQ ID NO: 2107 - RNA, 19 nt, Artificial Sequence
  Synthetic
ggagcccaccaugcuucuu

SEQ ID NO: 2108 - RNA, 19 nt, Artificial Sequence
  Synthetic
uuggaccagaguuccccuc

SEQ ID NO: 2109 - RNA, 19 nt, Artificial Sequence
  Synthetic
ccccagagcggccccccug

SEQ ID NO: 2110 - RNA, 19 nt, Artificial Sequence
  Synthetic
gggacgccucccuccuaca

SEQ ID NO: 2111 - RNA, 19 nt, Artificial Sequence
  Synthetic
aaacugccuuugccugggc

SEQ ID NO: 2112 - RNA, 19 nt, Artificial Sequence
  Synthetic
cccuacgacagucgagacg

SEQ ID NO: 2113 - RNA, 19 nt, Artificial Sequence
  Synthetic
gacuucccccuccgcaaaa

SEQ ID NO: 2114 - RNA, 19 nt, Artificial Sequence
  Synthetic
acagccucugaacccaacu

SEQ ID NO: 2115 - RNA, 19 nt, Artificial Sequence
  Synthetic
uugaaagugcguucaaggc

SEQ ID NO: 2116 - RNA, 19 nt, Artificial Sequence
  Synthetic
cuaaaacagaagguggcug

SEQ ID NO: 2117 - RNA, 19 nt, Artificial Sequence
  Synthetic
gagcggagaagcagucccc

SEQ ID NO: 2118 - RNA, 19 nt, Artificial Sequence
  Synthetic
cuccugcgucgcaaggaug

SEQ ID NO: 2119 - RNA, 19 nt, Artificial Sequence
  Synthetic
gggacuguuauuagcaccu

SEQ ID NO: 2120 - RNA, 19 nt, Artificial Sequence
  Synthetic
uuuaagaagagagcuguug

SEQ ID NO: 2121 - RNA, 19 nt, Artificial Sequence
  Synthetic
gagaucacaggugccgggc

SEQ ID NO: 2122 - RNA, 19 nt, Artificial Sequence
  Synthetic
ccuggggcgucguccgugu

SEQ ID NO: 2123 - RNA, 19 nt, Artificial Sequence
  Synthetic
uguaacagcgcacccggcu

SEQ ID NO: 2124 - RNA, 19 nt, Artificial Sequence
  Synthetic
uccggccccagcucuccca

SEQ ID NO: 2125 - RNA, 19 nt, Artificial Sequence
  Synthetic
aacagcucccacagcacca

SEQ ID NO: 2126 - RNA, 19 nt, Artificial Sequence
  Synthetic
aucgcugagaauggcuuua

SEQ ID NO: 2127 - RNA, 19 nt, Artificial Sequence
  Synthetic
acuggcucaguccccaaca

SEQ ID NO: 2128 - RNA, 19 nt, Artificial Sequence
  Synthetic
auccccacugagaugcucc

SEQ ID NO: 2129 - RNA, 19 nt, Artificial Sequence
  Synthetic
ccucagcaccgagcccucc

SEQ ID NO: 2130 - RNA, 19 nt, Artificial Sequence
  Synthetic
ccucuggacagcuccccca

SEQ ID NO: 2131 - RNA, 19 nt, Artificial Sequence
  Synthetic
aaccaguucagccucuaca

SEQ ID NO: 2132 - RNA, 19 nt, Artificial Sequence
  Synthetic
acgucuccuucucugccca

SEQ ID NO: 2133 - RNA, 19 nt, Artificial Sequence
  Synthetic
aacaucucccuagggcugc

SEQ ID NO: 2134 - RNA, 19 nt, Artificial Sequence
  Synthetic
caggccacggucacuguca

SEQ ID NO: 2135 - RNA, 19 nt, Artificial Sequence
  Synthetic
accaacucacaccucacug

SEQ ID NO: 2136 - RNA, 19 nt, Artificial Sequence
  Synthetic
gccuccccgaagcugucga

SEQ ID NO: 2137 - RNA, 19 nt, Artificial Sequence
  Synthetic
acacagcaggaggccgaga

SEQ ID NO: 2138 - RNA, 19 nt, Artificial Sequence
  Synthetic
aggcaggcccuccaguccc

SEQ ID NO: 2139 - RNA, 19 nt, Artificial Sequence
  Synthetic
cugcggcaggguggcacgc

SEQ ID NO: 2140 - RNA, 19 nt, Artificial Sequence
  Synthetic
cugaccggcaaguucauga

SEQ ID NO: 2141 - RNA, 19 nt, Artificial Sequence
  Synthetic
agcacauccucuauuccug

SEQ ID NO: 2142 - RNA, 19 nt, Artificial Sequence
  Synthetic
ggcugccugcugggcgugg

SEQ ID NO: 2143 - RNA, 19 nt, Artificial Sequence
  Synthetic
gcacuggagggcgacggga

SEQ ID NO: 2144 - RNA, 19 nt, Artificial Sequence
  Synthetic
agcccccacgggcaugccu

SEQ ID NO: 2145 - RNA, 19 nt, Artificial Sequence
  Synthetic
ucccugcugcagcaugugc

SEQ ID NO: 2146 - RNA, 19 nt, Artificial Sequence
  Synthetic
cuguugcuggagcaggccc

SEQ ID NO: 2147 - RNA, 19 nt, Artificial Sequence
  Synthetic
cggcagcagagcacccuca

SEQ ID NO: 2148 - RNA, 19 nt, Artificial Sequence
  Synthetic
auugcugugccacuccacg

SEQ ID NO: 2149 - RNA, 19 nt, Artificial Sequence
  Synthetic
gggcaguccccacuaguga

SEQ ID NO: 2150 - RNA, 19 nt, Artificial Sequence
  Synthetic
acgggugaacguguggcca

SEQ ID NO: 2151 - RNA, 19 nt, Artificial Sequence
  Synthetic
accagcaugcggacgguag

SEQ ID NO: 2152 - RNA, 19 nt, Artificial Sequence
  Synthetic
ggcaagcucccgcggcauc

SEQ ID NO: 2153 - RNA, 19 nt, Artificial Sequence
  Synthetic
cggccccugagccgcacuc

SEQ ID NO: 2154 - RNA, 19 nt, Artificial Sequence
  Synthetic
caguccucaccgcugccgc

SEQ ID NO: 2155 - RNA, 19 nt, Artificial Sequence
  Synthetic
cagaguccccaggcccugc

SEQ ID NO: 2156 - RNA, 19 nt, Artificial Sequence
  Synthetic
cagcagcuggucaugcaac

SEQ ID NO: 2157 - RNA, 19 nt, Artificial Sequence
  Synthetic
caacagcaccagcaguucc

SEQ ID NO: 2158 - RNA, 19 nt, Artificial Sequence
  Synthetic
cuggagaagcagaagcagc

SEQ ID NO: 2159 - RNA, 19 nt, Artificial Sequence
  Synthetic
cagcagcuacagcugggca

SEQ ID NO: 2160 - RNA, 19 nt, Artificial Sequence
  Synthetic
aagauccucaccaagacag

SEQ ID NO: 2161 - RNA, 19 nt, Artificial Sequence
  Synthetic
ggggagcugcccaggcagc

SEQ ID NO: 2162 - RNA, 19 nt, Artificial Sequence
  Synthetic
cccaccacccacccugagg

SEQ ID NO: 2163 - RNA, 19 nt, Artificial Sequence
  Synthetic
gagacagaggaggagcuga

SEQ ID NO: 2164 - RNA, 19 nt, Artificial Sequence
  Synthetic
acggagcagcaggaggucu

SEQ ID NO: 2165 - RNA, 19 nt, Artificial Sequence
  Synthetic
uugcugggggagggagccc

SEQ ID NO: 2166 - RNA, 19 nt, Artificial Sequence
  Synthetic
cugaccaugccccgggagg

SEQ ID NO: 2167 - RNA, 19 nt, Artificial Sequence
  Synthetic
ggcuccacagagagugaga

SEQ ID NO: 2168 - RNA, 19 nt, Artificial Sequence
  Synthetic
agcacacaggaagaccugg

SEQ ID NO: 2169 - RNA, 19 nt, Artificial Sequence
  Synthetic
gaggaggaggacgaggaag

SEQ ID NO: 2170 - RNA, 19 nt, Artificial Sequence
  Synthetic
gacgauggggaggaggagg

SEQ ID NO: 2171 - RNA, 19 nt, Artificial Sequence
  Synthetic
gaggauugcauccagguua

SEQ ID NO: 2172 - RNA, 19 nt, Artificial Sequence
  Synthetic
aaggacgaggagggcgaga

SEQ ID NO: 2173 - RNA, 19 nt, Artificial Sequence
  Synthetic
aguggugcugaggaggggc

SEQ ID NO: 2174 - RNA, 19 nt, Artificial Sequence
  Synthetic
cccgacuuggaggagccug

SEQ ID NO: 2175 - RNA, 19 nt, Artificial Sequence
  Synthetic
ggugcuggauacaaaaaac

SEQ ID NO: 2176 - RNA, 19 nt, Artificial Sequence
  Synthetic
cuguucucagaugcccagc

SEQ ID NO: 2177 - RNA, 19 nt, Artificial Sequence
  Synthetic
ccgcugcagccuuugcagg

SEQ ID NO: 2178 - RNA, 19 nt, Artificial Sequence
  Synthetic
guguaccaggcgccccuca

SEQ ID NO: 2179 - RNA, 19 nt, Artificial Sequence
  Synthetic
agccuggccacugugcccc

SEQ ID NO: 2180 - RNA, 19 nt, Artificial Sequence
  Synthetic
caccaggcccugggccgua

SEQ ID NO: 2181 - RNA, 19 nt, Artificial Sequence
  Synthetic
acccaguccuccccugcug

SEQ ID NO: 2182 - RNA, 19 nt, Artificial Sequence
  Synthetic
gccccugggggcaugaaga

SEQ ID NO: 2183 - RNA, 19 nt, Artificial Sequence
  Synthetic
agccccccagaccagcccg

SEQ ID NO: 2184 - RNA, 19 nt, Artificial Sequence
  Synthetic
gucaagcaccucuucacca

SEQ ID NO: 2185 - RNA, 19 nt, Artificial Sequence
  Synthetic
acagguguggucuacgaca

SEQ ID NO: 2186 - RNA, 19 nt, Artificial Sequence
  Synthetic
acguucaugcuaaagcacc

SEQ ID NO: 2187 - RNA, 19 nt, Artificial Sequence
  Synthetic
cagugcaugugcgggaaca

SEQ ID NO: 2188 - RNA, 19 nt, Artificial Sequence
  Synthetic
acacacgugcacccugagc

SEQ ID NO: 2189 - RNA, 19 nt, Artificial Sequence
  Synthetic
caugcuggccggauccaga

SEQ ID NO: 2190 - RNA, 19 nt, Artificial Sequence
  Synthetic
agcaucuggucccggcugc

SEQ ID NO: 2191 - RNA, 19 nt, Artificial Sequence
  Synthetic
caggagacaggccugcuua

SEQ ID NO: 2192 - RNA, 19 nt, Artificial Sequence
  Synthetic
agcaagugcgagcggaucc

SEQ ID NO: 2193 - RNA, 19 nt, Artificial Sequence
  Synthetic
cgaggucgcaaagccacgc

SEQ ID NO: 2194 - RNA, 19 nt, Artificial Sequence
  Synthetic
cuagaugagauccagacag

SEQ ID NO: 2195 - RNA, 19 nt, Artificial Sequence
  Synthetic
gugcacucugaauaccaca

SEQ ID NO: 2196 - RNA, 19 nt, Artificial Sequence
  Synthetic
acccugcucuaugggacca

SEQ ID NO: 2197 - RNA, 19 nt, Artificial Sequence
  Synthetic
aguccccucaaccggcaga

SEQ ID NO: 2198 - RNA, 19 nt, Artificial Sequence
  Synthetic
aagcuagacagcaagaagu

SEQ ID NO: 2199 - RNA, 19 nt, Artificial Sequence
  Synthetic
uugcucggccccaucagcc

SEQ ID NO: 2200 - RNA, 19 nt, Artificial Sequence
  Synthetic
cagaagauguaugcugugc

SEQ ID NO: 2201 - RNA, 19 nt, Artificial Sequence
  Synthetic
cugccuugugggggcaucg

SEQ ID NO: 2202 - RNA, 19 nt, Artificial Sequence
  Synthetic
gggguggacagugacaccg

SEQ ID NO: 2203 - RNA, 19 nt, Artificial Sequence
  Synthetic
guguggaaugagaugcacu

SEQ ID NO: 2204 - RNA, 19 nt, Artificial Sequence
  Synthetic
uccuccagugcugugcgca

SEQ ID NO: 2205 - RNA, 19 nt, Artificial Sequence
  Synthetic
auggcagugggcugccugc

SEQ ID NO: 2206 - RNA, 19 nt, Artificial Sequence
  Synthetic
cuggagcuggccuucaagg

SEQ ID NO: 2207 - RNA, 19 nt, Artificial Sequence
  Synthetic
guggcugcaggagagcuca

SEQ ID NO: 2208 - RNA, 19 nt, Artificial Sequence
  Synthetic
aagaauggauuugccauca

SEQ ID NO: 2209 - RNA, 19 nt, Artificial Sequence
  Synthetic
auccggcccccaggacacc

SEQ ID NO: 2210 - RNA, 19 nt, Artificial Sequence
  Synthetic
cacgccgaggaauccacag

SEQ ID NO: 2211 - RNA, 19 nt, Artificial Sequence
  Synthetic
gccaugggauucugcuucu

SEQ ID NO: 2212 - RNA, 19 nt, Artificial Sequence
  Synthetic
uucaacucuguagccauca

SEQ ID NO: 2213 - RNA, 19 nt, Artificial Sequence
  Synthetic
accgcaaaacuccuacagc

SEQ ID NO: 2214 - RNA, 19 nt, Artificial Sequence
  Synthetic
cagaaguugaacgugggca

SEQ ID NO: 2215 - RNA, 19 nt, Artificial Sequence
  Synthetic
aagguccucaucguggacu

SEQ ID NO: 2216 - RNA, 19 nt, Artificial Sequence
  Synthetic
ugggacauucaccauggca

SEQ ID NO: 2217 - RNA, 19 nt, Artificial Sequence
  Synthetic
aauggcacccagcaggcgu

SEQ ID NO: 2218 - RNA, 19 nt, Artificial Sequence
  Synthetic
uucuacaaugaccccucug

SEQ ID NO: 2219 - RNA, 19 nt, Artificial Sequence
  Synthetic
gugcucuacaucucucugc

SEQ ID NO: 2220 - RNA, 19 nt, Artificial Sequence
  Synthetic
caucgcuaugacaacggga

SEQ ID NO: 2221 - RNA, 19 nt, Artificial Sequence
  Synthetic
aacuucuuuccaggcucug

SEQ ID NO: 2222 - RNA, 19 nt, Artificial Sequence
  Synthetic
ggggcuccugaagagguug

SEQ ID NO: 2223 - RNA, 19 nt, Artificial Sequence
  Synthetic
gguggaggaccaggcgugg

SEQ ID NO: 2224 - RNA, 19 nt, Artificial Sequence
  Synthetic
ggguacaaugugaacgugg

SEQ ID NO: 2225 - RNA, 19 nt, Artificial Sequence
  Synthetic
gcauggacaggaggugugg

SEQ ID NO: 2226 - RNA, 19 nt, Artificial Sequence
  Synthetic
gacccccccauuggagacg

SEQ ID NO: 2227 - RNA, 19 nt, Artificial Sequence
  Synthetic
guggaguaccuuacagccu

SEQ ID NO: 2228 - RNA, 19 nt, Artificial Sequence
  Synthetic
uucaggacaguggugaugc

SEQ ID NO: 2229 - RNA, 19 nt, Artificial Sequence
  Synthetic
cccauugcccacgaguucu

SEQ ID NO: 2230 - RNA, 19 nt, Artificial Sequence
  Synthetic
ucaccugaugugguccuag

SEQ ID NO: 2231 - RNA, 19 nt, Artificial Sequence
  Synthetic
gucuccgccggguuugaug

SEQ ID NO: 2232 - RNA, 19 nt, Artificial Sequence
  Synthetic
gcuguugaaggacaucugu

SEQ ID NO: 2233 - RNA, 19 nt, Artificial Sequence
  Synthetic
ucuccucuggguggcuacu

SEQ ID NO: 2234 - RNA, 19 nt, Artificial Sequence
  Synthetic
ucugucaccgccagauguu

SEQ ID NO: 2235 - RNA, 19 nt, Artificial Sequence
  Synthetic
uuuggccacuugaccaggc

SEQ ID NO: 2236 - RNA, 19 nt, Artificial Sequence
  Synthetic
cagcugaugacccuggcag

SEQ ID NO: 2237 - RNA, 19 nt, Artificial Sequence
  Synthetic
gggggccggguggugcugg

SEQ ID NO: 2238 - RNA, 19 nt, Artificial Sequence
  Synthetic
gcccuggagggaggccaug

SEQ ID NO: 2239 - RNA, 19 nt, Artificial Sequence
  Synthetic
gacuugaccgccaucugug

SEQ ID NO: 2240 - RNA, 19 nt, Artificial Sequence
  Synthetic
gaugccucugaggcuugug

SEQ ID NO: 2241 - RNA, 19 nt, Artificial Sequence
  Synthetic
gucucggcucugcucagug

SEQ ID NO: 2242 - RNA, 19 nt, Artificial Sequence
  Synthetic
guagagcugcagcccuugg

SEQ ID NO: 2243 - RNA, 19 nt, Artificial Sequence
  Synthetic
gaugaggcagucuugcagc

SEQ ID NO: 2244 - RNA, 19 nt, Artificial Sequence
  Synthetic
caaaagcccaacaucaacg

SEQ ID NO: 2245 - RNA, 19 nt, Artificial Sequence
  Synthetic
gcaguggccacgcuagaga

SEQ ID NO: 2246 - RNA, 19 nt, Artificial Sequence
  Synthetic
aaagucaucgagauccaga

SEQ ID NO: 2247 - RNA, 19 nt, Artificial Sequence
  Synthetic
agcaaacacuggagcugug

SEQ ID NO: 2248 - RNA, 19 nt, Artificial Sequence
  Synthetic
gugcagaaguucgccgcug

SEQ ID NO: 2249 - RNA, 19 nt, Artificial Sequence
  Synthetic
ggucugggccggucccugc

SEQ ID NO: 2250 - RNA, 19 nt, Artificial Sequence
  Synthetic
cgagaggcccaagcaggug

SEQ ID NO: 2251 - RNA, 19 nt, Artificial Sequence
  Synthetic
gagaccgaggaggccgaga

SEQ ID NO: 2252 - RNA, 19 nt, Artificial Sequence
  Synthetic
acugugagcgccauggccu

SEQ ID NO: 2253 - RNA, 19 nt, Artificial Sequence
  Synthetic
uugcugucggugggggccg

SEQ ID NO: 2254 - RNA, 19 nt, Artificial Sequence
  Synthetic
gagcaggcccaggcugcgg

SEQ ID NO: 2255 - RNA, 19 nt, Artificial Sequence
  Synthetic
gcagcccgggaacacagcc

SEQ ID NO: 2256 - RNA, 19 nt, Artificial Sequence
  Synthetic
cccaggccggcagaggagc

SEQ ID NO: 2257 - RNA, 19 nt, Artificial Sequence
  Synthetic
cccauggagcaggagccug

SEQ ID NO: 2258 - RNA, 19 nt, Artificial Sequence
  Synthetic
gcccugugacgccccggcc

SEQ ID NO: 2259 - RNA, 19 nt, Artificial Sequence
  Synthetic
ccccaucccucugggcuuc

SEQ ID NO: 2260 - RNA, 19 nt, Artificial Sequence
  Synthetic
caccauugugauuuuguuu

SEQ ID NO: 2261 - RNA, 19 nt, Artificial Sequence
  Synthetic
uauuuuuucuauuaaaaac

SEQ ID NO: 2262 - RNA, 19 nt, Artificial Sequence
  Synthetic
caaaaagucacacauucaa

SEQ ID NO: 2263 - RNA, 19 nt, Artificial Sequence
  Synthetic
acaaggugugccguguggg

SEQ ID NO: 2264 - RNA, 19 nt, Artificial Sequence
  Synthetic
gucucucagccuugccccu

SEQ ID NO: 2265 - RNA, 19 nt, Artificial Sequence
  Synthetic
uccugcuccucuacgcugc

SEQ ID NO: 2266 - RNA, 19 nt, Artificial Sequence
  Synthetic
ccucaggcccccagcccug

SEQ ID NO: 2267 - RNA, 19 nt, Artificial Sequence
  Synthetic
guggcuuccaccucagcuc

SEQ ID NO: 2268 - RNA, 19 nt, Artificial Sequence
  Synthetic
cuagaagccugcucccucu

SEQ ID NO: 2269 - RNA, 19 nt, Artificial Sequence
  Synthetic
ugcaggggguggugguguc

SEQ ID NO: 2270 - RNA, 19 nt, Artificial Sequence
  Synthetic
cuucccagcccugucccau

SEQ ID NO: 2271 - RNA, 19 nt, Artificial Sequence
  Synthetic
ugugucccuccccccauuu

SEQ ID NO: 2272 - RNA, 19 nt, Artificial Sequence
  Synthetic
uuccugcauucugucuguc

SEQ ID NO: 2273 - RNA, 19 nt, Artificial Sequence
  Synthetic
ccuuuuccuccuuggagcc

SEQ ID NO: 2274 - RNA, 19 nt, Artificial Sequence
  Synthetic
cugggccagcucaaggugg

SEQ ID NO: 2275 - RNA, 19 nt, Artificial Sequence
  Synthetic
ggcacgggggcccagacag

SEQ ID NO: 2276 - RNA, 19 nt, Artificial Sequence
  Synthetic
guacucuccaguucugggg

SEQ ID NO: 2277 - RNA, 19 nt, Artificial Sequence
  Synthetic
gccccccgagugaggaggg

SEQ ID NO: 2278 - RNA, 19 nt, Artificial Sequence
  Synthetic
gaacgggaagucggugccu

SEQ ID NO: 2279 - RNA, 19 nt, Artificial Sequence
  Synthetic
uugguuucagcugauuugg

SEQ ID NO: 2280 - RNA, 19 nt, Artificial Sequence
  Synthetic
gggggaaaugccuuaauuu

SEQ ID NO: 2281 - RNA, 19 nt, Artificial Sequence
  Synthetic
ucacucuccucccuucucc

SEQ ID NO: 2282 - RNA, 19 nt, Artificial Sequence
  Synthetic
cagccucaggggaggaucu

SEQ ID NO: 2283 - RNA, 19 nt, Artificial Sequence
  Synthetic
uggaggauccacuacuguc

SEQ ID NO: 2284 - RNA, 19 nt, Artificial Sequence
  Synthetic
cuuuaagaugcagagugga

SEQ ID NO: 2285 - RNA, 19 nt, Artificial Sequence
  Synthetic
aggggaggugggcacccac

SEQ ID NO: 2286 - RNA, 19 nt, Artificial Sequence
  Synthetic
cccugcgauucuccacccu

SEQ ID NO: 2287 - RNA, 19 nt, Artificial Sequence
  Synthetic
uuuccccuucuuucguccu

SEQ ID NO: 2288 - RNA, 19 nt, Artificial Sequence
  Synthetic
ucaccaucucugcagaccc

SEQ ID NO: 2289 - RNA, 19 nt, Artificial Sequence
  Synthetic
ccucuccuccuccuuccuc

SEQ ID NO: 2290 - RNA, 19 nt, Artificial Sequence
  Synthetic
cuuggucucagcacugaug

SEQ ID NO: 2291 - RNA, 19 nt, Artificial Sequence
  Synthetic
gggaggcuggugcccaagc

SEQ ID NO: 2292 - RNA, 19 nt, Artificial Sequence
  Synthetic
cuguggccugcagucugug

SEQ ID NO: 2293 - RNA, 19 nt, Artificial Sequence
  Synthetic
gaggagggcugucuugccu

SEQ ID NO: 2294 - RNA, 19 nt, Artificial Sequence
  Synthetic
ucacacuccucacagccua

SEQ ID NO: 2295 - RNA, 19 nt, Artificial Sequence
  Synthetic
acuuccccuuccccggggc

SEQ ID NO: 2296 - RNA, 19 nt, Artificial Sequence
  Synthetic
cugagagggugaaagugug

SEQ ID NO: 2297 - RNA, 19 nt, Artificial Sequence
  Synthetic
guggggaaggagaggacug

SEQ ID NO: 2298 - RNA, 19 nt, Artificial Sequence
  Synthetic
gguuuccuggguucucagg

SEQ ID NO: 2299 - RNA, 19 nt, Artificial Sequence
  Synthetic
gggccaggaggaguaacag

SEQ ID NO: 2300 - RNA, 19 nt, Artificial Sequence
  Synthetic
gaaccaggucugcucccca

SEQ ID NO: 2301 - RNA, 19 nt, Artificial Sequence
  Synthetic
accuuacucggauggccuc

SEQ ID NO: 2302 - RNA, 19 nt, Artificial Sequence
  Synthetic
cccugccccucugcuggca

SEQ ID NO: 2303 - RNA, 19 nt, Artificial Sequence
  Synthetic
acagccugggcaaggggag

SEQ ID NO: 2304 - RNA, 19 nt, Artificial Sequence
  Synthetic
gaagguggucccugcagag

SEQ ID NO: 2305 - RNA, 19 nt, Artificial Sequence
  Synthetic
ggggcuccaggcuggugag

SEQ ID NO: 2306 - RNA, 19 nt, Artificial Sequence
  Synthetic
gagccccccugcugucagg

SEQ ID NO: 2307 - RNA, 19 nt, Artificial Sequence
  Synthetic
gaccagauuuucccagcca

SEQ ID NO: 2308 - RNA, 19 nt, Artificial Sequence
  Synthetic
auccagcaugcugcgggga

SEQ ID NO: 2309 - RNA, 19 nt, Artificial Sequence
  Synthetic
agaaggggcagaggcucac

SEQ ID NO: 2310 - RNA, 19 nt, Artificial Sequence
  Synthetic
ccucccuccuggggccuuu

SEQ ID NO: 2311 - RNA, 19 nt, Artificial Sequence
  Synthetic
uuguuuuggauccugggga

SEQ ID NO: 2312 - RNA, 19 nt, Artificial Sequence
  Synthetic
auggugagaauggagguuc

SEQ ID NO: 2313 - RNA, 19 nt, Artificial Sequence
  Synthetic
cuagaagggguaaggccag

SEQ ID NO: 2314 - RNA, 19 nt, Artificial Sequence
  Synthetic
gaacccagggauccaggag

SEQ ID NO: 2315 - RNA, 19 nt, Artificial Sequence
  Synthetic
gucggcucucagcuggagc

SEQ ID NO: 2316 - RNA, 19 nt, Artificial Sequence
  Synthetic
cuuccauaccuucugggcu

SEQ ID NO: 2317 - RNA, 19 nt, Artificial Sequence
  Synthetic
ucccuuugcugaccaccag

SEQ ID NO: 2318 - RNA, 19 nt, Artificial Sequence
  Synthetic
gcccaagggagcuaagacc

SEQ ID NO: 2319 - RNA, 19 nt, Artificial Sequence
  Synthetic
caggagggggcugggcgcu

SEQ ID NO: 2320 - RNA, 19 nt, Artificial Sequence
  Synthetic
ugucccuucucuuucccag

SEQ ID NO: 2321 - RNA, 19 nt, Artificial Sequence
  Synthetic
ggagcccugccaggggcug

SEQ ID NO: 2322 - RNA, 19 nt, Artificial Sequence
  Synthetic
gugggccuacaaggcuucc

SEQ ID NO: 2323 - RNA, 19 nt, Artificial Sequence
  Synthetic
caggggaugccauccagcc

SEQ ID NO: 2324 - RNA, 19 nt, Artificial Sequence
  Synthetic
cuguaggaaaccaaagaug

SEQ ID NO: 2325 - RNA, 19 nt, Artificial Sequence
  Synthetic
gggaaguggcuccuagggg

SEQ ID NO: 2326 - RNA, 19 nt, Artificial Sequence
  Synthetic
ggcugacucuuccuuccuc

SEQ ID NO: 2327 - RNA, 19 nt, Artificial Sequence
  Synthetic
ccuccuccccaguaccaca

SEQ ID NO: 2328 - RNA, 19 nt, Artificial Sequence
  Synthetic
auauacuuucucuccuucu

SEQ ID NO: 2329 - RNA, 19 nt, Artificial Sequence
  Synthetic
uaucuccagggccccacca

SEQ ID NO: 2330 - RNA, 19 nt, Artificial Sequence
  Synthetic
aaucuguuuacauauuuau

SEQ ID NO: 2331 - RNA, 19 nt, Artificial Sequence
  Synthetic
uuauccuaugggggccuga

SEQ ID NO: 2332 - RNA, 19 nt, Artificial Sequence
  Synthetic
agcaggauugagggagcca

SEQ ID NO: 2333 - RNA, 19 nt, Artificial Sequence
  Synthetic
aggggaggggcaggagucc

SEQ ID NO: 2334 - RNA, 19 nt, Artificial Sequence
  Synthetic
ccagcaccaucgguucaua

SEQ ID NO: 2335 - RNA, 19 nt, Artificial Sequence
  Synthetic
agugugcuuguguguuugu

SEQ ID NO: 2336 - RNA, 19 nt, Artificial Sequence
  Synthetic
uuuuagauccuccuggggg

SEQ ID NO: 2337 - RNA, 19 nt, Artificial Sequence
  Synthetic
gauggggauggggccaggc

SEQ ID NO: 2338 - RNA, 19 nt, Artificial Sequence
  Synthetic
cucaguguacuaggccucu

SEQ ID NO: 2339 - RNA, 19 nt, Artificial Sequence
  Synthetic
ucugugcugagccccaggc

SEQ ID NO: 2340 - RNA, 19 nt, Artificial Sequence
  Synthetic
cucccggccccuuacccac

SEQ ID NO: 2341 - RNA, 19 nt, Artificial Sequence
  Synthetic
cucucucccuguggcuggu

SEQ ID NO: 2342 - RNA, 19 nt, Artificial Sequence
  Synthetic
ucugguucucauguaaacc

SEQ ID NO: 2343 - RNA, 19 nt, Artificial Sequence
  Synthetic
ccacuccuugcuuugucuc

SEQ ID NO: 2344 - RNA, 19 nt, Artificial Sequence
  Synthetic
cccuggauauggauuucag

SEQ ID NO: 2345 - RNA, 19 nt, Artificial Sequence
  Synthetic
guuaaguauuuuguaaccc

SEQ ID NO: 2346 - RNA, 19 nt, Artificial Sequence
  Synthetic
cguuacacuguguguccuu

SEQ ID NO: 2347 - RNA, 19 nt, Artificial Sequence
  Synthetic
uguguaaauaaacuuguuu

SEQ ID NO: 2348 - RNA, 19 nt, Artificial Sequence
  Synthetic
cgccaccaacaacaacauu

SEQ ID NO: 2349 - RNA, 19 nt, Artificial Sequence
  Synthetic
uccggcuccgcucgccgcc

SEQ ID NO: 2350 - RNA, 19 nt, Artificial Sequence
  Synthetic
caucuuugcggcggcuccu

SEQ ID NO: 2351 - RNA, 19 nt, Artificial Sequence
  Synthetic
ccuccucgacggcuccucc

SEQ ID NO: 2352 - RNA, 19 nt, Artificial Sequence
  Synthetic
gcggcagcggcggcagcac

SEQ ID NO: 2353 - RNA, 19 nt, Artificial Sequence
  Synthetic
gcggcggcagcagcggcgg

SEQ ID NO: 2354 - RNA, 19 nt, Artificial Sequence
  Synthetic
gcuccggcuucgcgggcgg

SEQ ID NO: 2355 - RNA, 19 nt, Artificial Sequence
  Synthetic
auccccgcugcggcucgag

SEQ ID NO: 2356 - RNA, 19 nt, Artificial Sequence
  Synthetic
ucaggcacucagaacggca

SEQ ID NO: 2357 - RNA, 19 nt, Artificial Sequence
  Synthetic
uccuucggggcgaggcagu

SEQ ID NO: 2358 - RNA, 19 nt, Artificial Sequence
  Synthetic
aaugcccauccgaggccau

SEQ ID NO: 2359 - RNA, 19 nt, Artificial Sequence
  Synthetic
cggggccgccgugccucua

SEQ ID NO: 2360 - RNA, 19 nt, Artificial Sequence
  Synthetic
acggacgggacgggagccc

SEQ ID NO: 2361 - RNA, 19 nt, Artificial Sequence
  Synthetic
acagacgauaacagacaga

SEQ ID NO: 2362 - RNA, 19 nt, Artificial Sequence
  Synthetic
gcggugaugucaagagaga

SEQ ID NO: 2363 - RNA, 19 nt, Artificial Sequence
  Synthetic
acgggaggggguggagcug

SEQ ID NO: 2364 - RNA, 19 nt, Artificial Sequence
  Synthetic
cuggcguugggggcuggga

SEQ ID NO: 2365 - RNA, 19 nt, Artificial Sequence
  Synthetic
cucugggccugcaggaagc

SEQ ID NO: 2366 - RNA, 19 nt, Artificial Sequence
  Synthetic
ugggagaguucaugccggc

SEQ ID NO: 2367 - RNA, 19 nt, Artificial Sequence
  Synthetic
acaucccauccgacucguu

SEQ ID NO: 2368 - RNA, 19 nt, Artificial Sequence
  Synthetic
aggaugguucccgaccuga

SEQ ID NO: 2369 - RNA, 19 nt, Artificial Sequence
  Synthetic
uccgcggcaggauuuccaa

SEQ ID NO: 2370 - RNA, 19 nt, Artificial Sequence
  Synthetic
ggaugcugugcagagaagu

SEQ ID NO: 2371 - RNA, 19 nt, Artificial Sequence
  Synthetic
ucaccuccacugucacagg

SEQ ID NO: 2372 - RNA, 19 nt, Artificial Sequence
  Synthetic
cucuuggcagcaccggcuu

SEQ ID NO: 2373 - RNA, 19 nt, Artificial Sequence
  Synthetic
ccauggaacugggcauggc

SEQ ID NO: 2374 - RNA, 19 nt, Artificial Sequence
  Synthetic
ugccuccacccccaccccc

SEQ ID NO: 2375 - RNA, 19 nt, Artificial Sequence
  Synthetic
gcuccacagggcuggggcu

SEQ ID NO: 2376 - RNA, 19 nt, Artificial Sequence
  Synthetic
ccaccagagccccccguag

SEQ ID NO: 2377 - RNA, 19 nt, Artificial Sequence
  Synthetic
gugugggguccacagagcc

SEQ ID NO: 2378 - RNA, 19 nt, Artificial Sequence
  Synthetic
gcaguugcugcucccgcag

SEQ ID NO: 2379 - RNA, 19 nt, Artificial Sequence
  Synthetic
gcgccaggagcuccugcug

SEQ ID NO: 2380 - RNA, 19 nt, Artificial Sequence
  Synthetic
gcugcugcugcugcuugag

SEQ ID NO: 2381 - RNA, 19 nt, Artificial Sequence
  Synthetic
acaggagcugcuucugcag

SEQ ID NO: 2382 - RNA, 19 nt, Artificial Sequence
  Synthetic
guuucuggaacucagcgaa

SEQ ID NO: 2383 - RNA, 19 nt, Artificial Sequence
  Synthetic
uugucagguggucaugcug

SEQ ID NO: 2384 - RNA, 19 nt, Artificial Sequence
  Synthetic
gcuggaccucaugcugccu

SEQ ID NO: 2385 - RNA, 19 nt, Artificial Sequence
  Synthetic
gcuugaggugcuucugcag

SEQ ID NO: 2386 - RNA, 19 nt, Artificial Sequence
  Synthetic
ccagcaucuccugcugcug

SEQ ID NO: 2387 - RNA, 19 nt, Artificial Sequence
  Synthetic
ccugcugcugcuuggcugc

SEQ ID NO: 2388 - RNA, 19 nt, Artificial Sequence
  Synthetic
gcuuggcugccagcaucuc

SEQ ID NO: 2389 - RNA, 19 nt, Artificial Sequence
  Synthetic
gcuccagcuccugcugccg

SEQ ID NO: 2390 - RNA, 19 nt, Artificial Sequence
  Synthetic
gcucccgcugccgcugcug

SEQ ID NO: 2391 - RNA, 19 nt, Artificial Sequence
  Synthetic
gcucuuccugccgcugcug

SEQ ID NO: 2392 - RNA, 19 nt, Artificial Sequence
  Synthetic
ccagccgcugcuucuccag

SEQ ID NO: 2393 - RNA, 19 nt, Artificial Sequence
  Synthetic
ggaugagcagcugcugcuc

SEQ ID NO: 2394 - RNA, 19 nt, Artificial Sequence
  Synthetic
ucuucuccuuguuccgcag

SEQ ID NO: 2395 - RNA, 19 nt, Artificial Sequence
  Synthetic
caauggcacucucuuugcu

SEQ ID NO: 2396 - RNA, 19 nt, Artificial Sequence
  Synthetic
gcuuuaccucagugcuggc

SEQ ID NO: 2397 - RNA, 19 nt, Artificial Sequence
  Synthetic
ggaauuccuggagccucag

SEQ ID NO: 2398 - RNA, 19 nt, Artificial Sequence
  Synthetic
ccuuugacuucgacaagag

SEQ ID NO: 2399 - RNA, 19 nt, Artificial Sequence
  Synthetic
ggccgccuggugugggcuc

SEQ ID NO: 2400 - RNA, 19 nt, Artificial Sequence
  Synthetic
gugggagggaaugguugag

SEQ ID NO: 2401 - RNA, 19 nt, Artificial Sequence
  Synthetic
cccagcauuuggggugcug

SEQ ID NO: 2402 - RNA, 19 nt, Artificial Sequence
  Synthetic
aagaagcauggugggcucc

SEQ ID NO: 2403 - RNA, 19 nt, Artificial Sequence
  Synthetic
gaggggaacucugguccaa

SEQ ID NO: 2404 - RNA, 19 nt, Artificial Sequence
  Synthetic
caggggggccgcucugggg

SEQ ID NO: 2405 - RNA, 19 nt, Artificial Sequence
  Synthetic
uguaggagggaggcguccc

SEQ ID NO: 2406 - RNA, 19 nt, Artificial Sequence
  Synthetic
gcccaggcaaaggcaguuu

SEQ ID NO: 2407 - RNA, 19 nt, Artificial Sequence
  Synthetic
cgucucgacugucguaggg

SEQ ID NO: 2408 - RNA, 19 nt, Artificial Sequence
  Synthetic
uuuugcggagggggaaguc

SEQ ID NO: 2409 - RNA, 19 nt, Artificial Sequence
  Synthetic
aguuggguucagaggcugu

SEQ ID NO: 2410 - RNA, 19 nt, Artificial Sequence
  Synthetic
gccuugaacgcacuuucaa

SEQ ID NO: 2411 - RNA, 19 nt, Artificial Sequence
  Synthetic
cagccaccuucuguuuuag

SEQ ID NO: 2412 - RNA, 19 nt, Artificial Sequence
  Synthetic
ggggacugcuucuccgcuc

SEQ ID NO: 2413 - RNA, 19 nt, Artificial Sequence
  Synthetic
cauccuugcgacgcaggag

SEQ ID NO: 2414 - RNA, 19 nt, Artificial Sequence
  Synthetic
aggugcuaauaacaguccc

SEQ ID NO: 2415 - RNA, 19 nt, Artificial Sequence
  Synthetic
caacagcucucuucuuaaa

SEQ ID NO: 2416 - RNA, 19 nt, Artificial Sequence
  Synthetic
gcccggcaccugugaucuc

SEQ ID NO: 2417 - RNA, 19 nt, Artificial Sequence
  Synthetic
acacggacgacgccccagg

SEQ ID NO: 2418 - RNA, 19 nt, Artificial Sequence
  Synthetic
agccgggugcgcuguuaca

SEQ ID NO: 2419 - RNA, 19 nt, Artificial Sequence
  Synthetic
ugggagagcuggggccgga

SEQ ID NO: 2420 - RNA, 19 nt, Artificial Sequence
  Synthetic
uggugcugugggagcuguu

SEQ ID NO: 2421 - RNA, 19 nt, Artificial Sequence
  Synthetic
uaaagccauucucagcgau

SEQ ID NO: 2422 - RNA, 19 nt, Artificial Sequence
  Synthetic
uguuggggacugagccagu

SEQ ID NO: 2423 - RNA, 19 nt, Artificial Sequence
  Synthetic
ggagcaucucaguggggau

SEQ ID NO: 2424 - RNA, 19 nt, Artificial Sequence
  Synthetic
ggagggcucggugcugagg

SEQ ID NO: 2425 - RNA, 19 nt, Artificial Sequence
  Synthetic
ugggggagcuguccagagg

SEQ ID NO: 2426 - RNA, 19 nt, Artificial Sequence
  Synthetic
uguagaggcugaacugguu

SEQ ID NO: 2427 - RNA, 19 nt, Artificial Sequence
  Synthetic
ugggcagagaaggagacgu

SEQ ID NO: 2428 - RNA, 19 nt, Artificial Sequence
  Synthetic
gcagcccuagggagauguu

SEQ ID NO: 2429 - RNA, 19 nt, Artificial Sequence
  Synthetic
ugacagugaccguggccug

SEQ ID NO: 2430 - RNA, 19 nt, Artificial Sequence
  Synthetic
cagugaggugugaguuggu

SEQ ID NO: 2431 - RNA, 19 nt, Artificial Sequence
  Synthetic
ucgacagcuucggggaggc

SEQ ID NO: 2432 - RNA, 19 nt, Artificial Sequence
  Synthetic
ucucggccuccugcugugu

SEQ ID NO: 2433 - RNA, 19 nt, Artificial Sequence
  Synthetic
gggacuggagggccugccu

SEQ ID NO: 2434 - RNA, 19 nt, Artificial Sequence
  Synthetic
gcgugccacccugccgcag

SEQ ID NO: 2435 - RNA, 19 nt, Artificial Sequence
  Synthetic
ucaugaacuugccggucag

SEQ ID NO: 2436 - RNA, 19 nt, Artificial Sequence
  Synthetic
caggaauagaggaugugcu

SEQ ID NO: 2437 - RNA, 19 nt, Artificial Sequence
  Synthetic
ccacgcccagcaggcagcc

SEQ ID NO: 2438 - RNA, 19 nt, Artificial Sequence
  Synthetic
ucccgucgcccuccagugc

SEQ ID NO: 2439 - RNA, 19 nt, Artificial Sequence
  Synthetic
aggcaugcccgugggggcu

SEQ ID NO: 2440 - RNA, 19 nt, Artificial Sequence
  Synthetic
gcacaugcugcagcaggga

SEQ ID NO: 2441 - RNA, 19 nt, Artificial Sequence
  Synthetic
gggccugcuccagcaacag

SEQ ID NO: 2442 - RNA, 19 nt, Artificial Sequence
  Synthetic
ugagggugcucugcugccg

SEQ ID NO: 2443 - RNA, 19 nt, Artificial Sequence
  Synthetic
cguggaguggcacagcaau

SEQ ID NO: 2444 - RNA, 19 nt, Artificial Sequence
  Synthetic
ucacuaguggggacugccc

SEQ ID NO: 2445 - RNA, 19 nt, Artificial Sequence
  Synthetic
uggccacacguucacccgu

SEQ ID NO: 2446 - RNA, 19 nt, Artificial Sequence
  Synthetic
cuaccguccgcaugcuggu

SEQ ID NO: 2447 - RNA, 19 nt, Artificial Sequence
  Synthetic
gaugccgcgggagcuugcc

SEQ ID NO: 2448 - RNA, 19 nt, Artificial Sequence
  Synthetic
gagugcggcucaggggccg

SEQ ID NO: 2449 - RNA, 19 nt, Artificial Sequence
  Synthetic
gcggcagcggugaggacug

SEQ ID NO: 2450 - RNA, 19 nt, Artificial Sequence
  Synthetic
gcagggccuggggacucug

SEQ ID NO: 2451 - RNA, 19 nt, Artificial Sequence
  Synthetic
guugcaugaccagcugcug

SEQ ID NO: 2452 - RNA, 19 nt, Artificial Sequence
  Synthetic
ggaacugcuggugcuguug

SEQ ID NO: 2453 - RNA, 19 nt, Artificial Sequence
  Synthetic
gcugcuucugcuucuccag

SEQ ID NO: 2454 - RNA, 19 nt, Artificial Sequence
  Synthetic
ugcccagcuguagcugcug

SEQ ID NO: 2455 - RNA, 19 nt, Artificial Sequence
  Synthetic
cugucuuggugaggaucuu

SEQ ID NO: 2456 - RNA, 19 nt, Artificial Sequence
  Synthetic
gcugccugggcagcucccc

SEQ ID NO: 2457 - RNA, 19 nt, Artificial Sequence
  Synthetic
ccucagggugggugguggg

SEQ ID NO: 2458 - RNA, 19 nt, Artificial Sequence
  Synthetic
ucagcuccuccucugucuc

SEQ ID NO: 2459 - RNA, 19 nt, Artificial Sequence
  Synthetic
agaccuccugcugcuccgu

SEQ ID NO: 2460 - RNA, 19 nt, Artificial Sequence
  Synthetic
gggcucccucccccagcaa

SEQ ID NO: 2461 - RNA, 19 nt, Artificial Sequence
  Synthetic
ccucccggggcauggucag

SEQ ID NO: 2462 - RNA, 19 nt, Artificial Sequence
  Synthetic
ucucacucucuguggagcc

SEQ ID NO: 2463 - RNA, 19 nt, Artificial Sequence
  Synthetic
ccaggucuuccugugugcu

SEQ ID NO: 2464 - RNA, 19 nt, Artificial Sequence
  Synthetic
cuuccucguccuccuccuc

SEQ ID NO: 2465 - RNA, 19 nt, Artificial Sequence
  Synthetic
ccuccuccuccccaucguc

SEQ ID NO: 2466 - RNA, 19 nt, Artificial Sequence
  Synthetic
uaaccuggaugcaauccuc

SEQ ID NO: 2467 - RNA, 19 nt, Artificial Sequence
  Synthetic
ucucgcccuccucguccuu

SEQ ID NO: 2468 - RNA, 19 nt, Artificial Sequence
  Synthetic
gccccuccucagcaccacu

SEQ ID NO: 2469 - RNA, 19 nt, Artificial Sequence
  Synthetic
caggcuccuccaagucggg

SEQ ID NO: 2470 - RNA, 19 nt, Artificial Sequence
  Synthetic
guuuuuuguauccagcacc

SEQ ID NO: 2471 - RNA, 19 nt, Artificial Sequence
  Synthetic
gcugggcaucugagaacag

SEQ ID NO: 2472 - RNA, 19 nt, Artificial Sequence
  Synthetic
ccugcaaaggcugcagcgg

SEQ ID NO: 2473 - RNA, 19 nt, Artificial Sequence
  Synthetic
ugaggggcgccugguacac

SEQ ID NO: 2474 - RNA, 19 nt, Artificial Sequence
  Synthetic
ggggcacaguggccaggcu

SEQ ID NO: 2475 - RNA, 19 nt, Artificial Sequence
  Synthetic
uacggcccagggccuggug

SEQ ID NO: 2476 - RNA, 19 nt, Artificial Sequence
  Synthetic
cagcaggggaggacugggu

SEQ ID NO: 2477 - RNA, 19 nt, Artificial Sequence
  Synthetic
ucuucaugcccccaggggc

SEQ ID NO: 2478 - RNA, 19 nt, Artificial Sequence
  Synthetic
cgggcuggucuggggggcu

SEQ ID NO: 2479 - RNA, 19 nt, Artificial Sequence
  Synthetic
uggugaagaggugcuugac

SEQ ID NO: 2480 - RNA, 19 nt, Artificial Sequence
  Synthetic
ugucguagaccacaccugu

SEQ ID NO: 2481 - RNA, 19 nt, Artificial Sequence
  Synthetic
ggugcuuuagcaugaacgu

SEQ ID NO: 2482 - RNA, 19 nt, Artificial Sequence
  Synthetic
uguucccgcacaugcacug

SEQ ID NO: 2483 - RNA, 19 nt, Artificial Sequence
  Synthetic
gcucagggugcacgugugu

SEQ ID NO: 2484 - RNA, 19 nt, Artificial Sequence
  Synthetic
ucuggauccggccagcaug

SEQ ID NO: 2485 - RNA, 19 nt, Artificial Sequence
  Synthetic
gcagccgggaccagaugcu

SEQ ID NO: 2486 - RNA, 19 nt, Artificial Sequence
  Synthetic
uaagcaggccugucuccug

SEQ ID NO: 2487 - RNA, 19 nt, Artificial Sequence
  Synthetic
ggauccgcucgcacuugcu

SEQ ID NO: 2488 - RNA, 19 nt, Artificial Sequence
  Synthetic
gcguggcuuugcgaccucg

SEQ ID NO: 2489 - RNA, 19 nt, Artificial Sequence
  Synthetic
cugucuggaucucaucuag

SEQ ID NO: 2490 - RNA, 19 nt, Artificial Sequence
  Synthetic
ugugguauucagagugcac

SEQ ID NO: 2491 - RNA, 19 nt, Artificial Sequence
  Synthetic
uggucccauagagcagggu

SEQ ID NO: 2492 - RNA, 19 nt, Artificial Sequence
  Synthetic
ucugccgguugaggggacu

SEQ ID NO: 2493 - RNA, 19 nt, Artificial Sequence
  Synthetic
acuucuugcugucuagcuu

SEQ ID NO: 2494 - RNA, 19 nt, Artificial Sequence
  Synthetic
ggcugauggggccgagcaa

SEQ ID NO: 2495 - RNA, 19 nt, Artificial Sequence
  Synthetic
gcacagcauacaucuucug

SEQ ID NO: 2496 - RNA, 19 nt, Artificial Sequence
  Synthetic
cgaugcccccacaaggcag

SEQ ID NO: 2497 - RNA, 19 nt, Artificial Sequence
  Synthetic
cggugucacuguccacccc

SEQ ID NO: 2498 - RNA, 19 nt, Artificial Sequence
  Synthetic
agugcaucucauuccacac

SEQ ID NO: 2499 - RNA, 19 nt, Artificial Sequence
  Synthetic
ugcgcacagcacuggagga

SEQ ID NO: 2500 - RNA, 19 nt, Artificial Sequence
  Synthetic
gcaggcagcccacugccau

SEQ ID NO: 2501 - RNA, 19 nt, Artificial Sequence
  Synthetic
ccuugaaggccagcuccag

SEQ ID NO: 2502 - RNA, 19 nt, Artificial Sequence
  Synthetic
ugagcucuccugcagccac

SEQ ID NO: 2503 - RNA, 19 nt, Artificial Sequence
  Synthetic
ugauggcaaauccauucuu

SEQ ID NO: 2504 - RNA, 19 nt, Artificial Sequence
  Synthetic
gguguccugggggccggau

SEQ ID NO: 2505 - RNA, 19 nt, Artificial Sequence
  Synthetic
cuguggauuccucggcgug

SEQ ID NO: 2506 - RNA, 19 nt, Artificial Sequence
  Synthetic
agaagcagaaucccauggc

SEQ ID NO: 2507 - RNA, 19 nt, Artificial Sequence
  Synthetic
ugauggcuacagaguugaa

SEQ ID NO: 2508 - RNA, 19 nt, Artificial Sequence
  Synthetic
gcuguaggaguuuugcggu

SEQ ID NO: 2509 - RNA, 19 nt, Artificial Sequence
  Synthetic
ugcccacguucaacuucug

SEQ ID NO: 2510 - RNA, 19 nt, Artificial Sequence
  Synthetic
aguccacgaugaggaccuu

SEQ ID NO: 2511 - RNA, 19 nt, Artificial Sequence
  Synthetic
ugccauggugaauguccca

SEQ ID NO: 2512 - RNA, 19 nt, Artificial Sequence
  Synthetic
acgccugcugggugccauu

SEQ ID NO: 2513 - RNA, 19 nt, Artificial Sequence
  Synthetic
cagaggggucauuguagaa

SEQ ID NO: 2514 - RNA, 19 nt, Artificial Sequence
  Synthetic
gcagagagauguagagcac

SEQ ID NO: 2515 - RNA, 19 nt, Artificial Sequence
  Synthetic
ucccguugucauagcgaug

SEQ ID NO: 2516 - RNA, 19 nt, Artificial Sequence
  Synthetic
cagagccuggaaagaaguu

SEQ ID NO: 2517 - RNA, 19 nt, Artificial Sequence
  Synthetic
caaccucuucaggagcccc

SEQ ID NO: 2518 - RNA, 19 nt, Artificial Sequence
  Synthetic
ccacgccugguccuccacc

SEQ ID NO: 2519 - RNA, 19 nt, Artificial Sequence
  Synthetic
ccacguucacauuguaccc

SEQ ID NO: 2520 - RNA, 19 nt, Artificial Sequence
  Synthetic
ccacaccuccuguccaugc

SEQ ID NO: 2521 - RNA, 19 nt, Artificial Sequence
  Synthetic
cgucuccaauggggggguc

SEQ ID NO: 2522 - RNA, 19 nt, Artificial Sequence
  Synthetic
aggcuguaagguacuccac

SEQ ID NO: 2523 - RNA, 19 nt, Artificial Sequence
  Synthetic
gcaucaccacuguccugaa

SEQ ID NO: 2524 - RNA, 19 nt, Artificial Sequence
  Synthetic
agaacucgugggcaauggg

SEQ ID NO: 2525 - RNA, 19 nt, Artificial Sequence
  Synthetic
cuaggaccacaucagguga

SEQ ID NO: 2526 - RNA, 19 nt, Artificial Sequence
  Synthetic
caucaaacccggcggagac

SEQ ID NO: 2527 - RNA, 19 nt, Artificial Sequence
  Synthetic
acagauguccuucaacagc

SEQ ID NO: 2528 - RNA, 19 nt, Artificial Sequence
  Synthetic
aguagccacccagaggaga

SEQ ID NO: 2529 - RNA, 19 nt, Artificial Sequence
  Synthetic
aacaucuggcggugacaga

SEQ ID NO: 2530 - RNA, 19 nt, Artificial Sequence
  Synthetic
gccuggucaaguggccaaa

SEQ ID NO: 2531 - RNA, 19 nt, Artificial Sequence
  Synthetic
cugccagggucaucagcug

SEQ ID NO: 2532 - RNA, 19 nt, Artificial Sequence
  Synthetic
ccagcaccacccggccccc

SEQ ID NO: 2533 - RNA, 19 nt, Artificial Sequence
  Synthetic
cauggccucccuccagggc

SEQ ID NO: 2534 - RNA, 19 nt, Artificial Sequence
  Synthetic
cacagauggcggucaaguc

SEQ ID NO: 2535 - RNA, 19 nt, Artificial Sequence
  Synthetic
cacaagccucagaggcauc

SEQ ID NO: 2536 - RNA, 19 nt, Artificial Sequence
  Synthetic
cacugagcagagccgagac

SEQ ID NO: 2537 - RNA, 19 nt, Artificial Sequence
  Synthetic
ccaagggcugcagcucuac

SEQ ID NO: 2538 - RNA, 19 nt, Artificial Sequence
  Synthetic
gcugcaagacugccucauc

SEQ ID NO: 2539 - RNA, 19 nt, Artificial Sequence
  Synthetic
cguugauguugggcuuuug

SEQ ID NO: 2540 - RNA, 19 nt, Artificial Sequence
  Synthetic
ucucuagcguggccacugc

SEQ ID NO: 2541 - RNA, 19 nt, Artificial Sequence
  Synthetic
ucuggaucucgaugacuuu

SEQ ID NO: 2542 - RNA, 19 nt, Artificial Sequence
  Synthetic
cacagcuccaguguuugcu

SEQ ID NO: 2543 - RNA, 19 nt, Artificial Sequence
  Synthetic
cagcggcgaacuucugcac

SEQ ID NO: 2544 - RNA, 19 nt, Artificial Sequence
  Synthetic
gcagggaccggcccagacc

SEQ ID NO: 2545 - RNA, 19 nt, Artificial Sequence
  Synthetic
caccugcuugggccucucg

SEQ ID NO: 2546 - RNA, 19 nt, Artificial Sequence
  Synthetic
ucucggccuccucggucuc

SEQ ID NO: 2547 - RNA, 19 nt, Artificial Sequence
  Synthetic
aggccauggcgcucacagu

SEQ ID NO: 2548 - RNA, 19 nt, Artificial Sequence
  Synthetic
cggcccccaccgacagcaa

SEQ ID NO: 2549 - RNA, 19 nt, Artificial Sequence
  Synthetic
ccgcagccugggccugcuc

SEQ ID NO: 2550 - RNA, 19 nt, Artificial Sequence
  Synthetic
ggcuguguucccgggcugc

SEQ ID NO: 2551 - RNA, 19 nt, Artificial Sequence
  Synthetic
gcuccucugccggccuggg

SEQ ID NO: 2552 - RNA, 19 nt, Artificial Sequence
  Synthetic
caggcuccugcuccauggg

SEQ ID NO: 2553 - RNA, 19 nt, Artificial Sequence
  Synthetic
ggccggggcgucacagggc

SEQ ID NO: 2554 - RNA, 19 nt, Artificial Sequence
  Synthetic
gaagcccagagggaugggg

SEQ ID NO: 2555 - RNA, 19 nt, Artificial Sequence
  Synthetic
aaacaaaaucacaauggug

SEQ ID NO: 2556 - RNA, 19 nt, Artificial Sequence
  Synthetic
guuuuuaauagaaaaaaua

SEQ ID NO: 2557 - RNA, 19 nt, Artificial Sequence
  Synthetic
uugaaugugugacuuuuug

SEQ ID NO: 2558 - RNA, 19 nt, Artificial Sequence
  Synthetic
cccacacggcacaccuugu

SEQ ID NO: 2559 - RNA, 19 nt, Artificial Sequence
  Synthetic
aggggcaaggcugagagac

SEQ ID NO: 2560 - RNA, 19 nt, Artificial Sequence
  Synthetic
gcagcguagaggagcagga

SEQ ID NO: 2561 - RNA, 19 nt, Artificial Sequence
  Synthetic
cagggcugggggccugagg

SEQ ID NO: 2562 - RNA, 19 nt, Artificial Sequence
  Synthetic
gagcugagguggaagccac

SEQ ID NO: 2563 - RNA, 19 nt, Artificial Sequence
  Synthetic
agagggagcaggcuucuag

SEQ ID NO: 2564 - RNA, 19 nt, Artificial Sequence
  Synthetic
gacaccaccacccccugca

SEQ ID NO: 2565 - RNA, 19 nt, Artificial Sequence
  Synthetic
augggacagggcugggaag

SEQ ID NO: 2566 - RNA, 19 nt, Artificial Sequence
  Synthetic
aaauggggggagggacaca

SEQ ID NO: 2567 - RNA, 19 nt, Artificial Sequence
  Synthetic
gacagacagaaugcaggaa

SEQ ID NO: 2568 - RNA, 19 nt, Artificial Sequence
  Synthetic
ggcuccaaggaggaaaagg

SEQ ID NO: 2569 - RNA, 19 nt, Artificial Sequence
  Synthetic
ccaccuugagcuggcccag

SEQ ID NO: 2570 - RNA, 19 nt, Artificial Sequence
  Synthetic
cugucugggcccccgugcc

SEQ ID NO: 2571 - RNA, 19 nt, Artificial Sequence
  Synthetic
ccccagaacuggagaguac

SEQ ID NO: 2572 - RNA, 19 nt, Artificial Sequence
  Synthetic
cccuccucacucggggggc

SEQ ID NO: 2573 - RNA, 19 nt, Artificial Sequence
  Synthetic
aggcaccgacuucccguuc

SEQ ID NO: 2574 - RNA, 19 nt, Artificial Sequence
  Synthetic
ccaaaucagcugaaaccaa

SEQ ID NO: 2575 - RNA, 19 nt, Artificial Sequence
  Synthetic
aaauuaaggcauuuccccc

SEQ ID NO: 2576 - RNA, 19 nt, Artificial Sequence
  Synthetic
ggagaagggaggagaguga

SEQ ID NO: 2577 - RNA, 19 nt, Artificial Sequence
  Synthetic
agauccuccccugaggcug

SEQ ID NO: 2578 - RNA, 19 nt, Artificial Sequence
  Synthetic
gacaguaguggauccucca

SEQ ID NO: 2579 - RNA, 19 nt, Artificial Sequence
  Synthetic
uccacucugcaucuuaaag

SEQ ID NO: 2580 - RNA, 19 nt, Artificial Sequence
  Synthetic
gugggugcccaccuccccu

SEQ ID NO: 2581 - RNA, 19 nt, Artificial Sequence
  Synthetic
aggguggagaaucgcaggg

SEQ ID NO: 2582 - RNA, 19 nt, Artificial Sequence
  Synthetic
aggacgaaagaaggggaaa

SEQ ID NO: 2583 - RNA, 19 nt, Artificial Sequence
  Synthetic
gggucugcagagaugguga

SEQ ID NO: 2584 - RNA, 19 nt, Artificial Sequence
  Synthetic
gaggaaggaggaggagagg

SEQ ID NO: 2585 - RNA, 19 nt, Artificial Sequence
  Synthetic
caucagugcugagaccaag

SEQ ID NO: 2586 - RNA, 19 nt, Artificial Sequence
  Synthetic
gcuugggcaccagccuccc

SEQ ID NO: 2587 - RNA, 19 nt, Artificial Sequence
  Synthetic
cacagacugcaggccacag

SEQ ID NO: 2588 - RNA, 19 nt, Artificial Sequence
  Synthetic
aggcaagacagcccuccuc

SEQ ID NO: 2589 - RNA, 19 nt, Artificial Sequence
  Synthetic
uaggcugugaggaguguga

SEQ ID NO: 2590 - RNA, 19 nt, Artificial Sequence
  Synthetic
gccccggggaaggggaagu

SEQ ID NO: 2591 - RNA, 19 nt, Artificial Sequence
  Synthetic
cacacuuucacccucucag

SEQ ID NO: 2592 - RNA, 19 nt, Artificial Sequence
  Synthetic
caguccucuccuuccccac

SEQ ID NO: 2593 - RNA, 19 nt, Artificial Sequence
  Synthetic
ccugagaacccaggaaacc

SEQ ID NO: 2594 - RNA, 19 nt, Artificial Sequence
  Synthetic
cuguuacuccuccuggccc

SEQ ID NO: 2595 - RNA, 19 nt, Artificial Sequence
  Synthetic
uggggagcagaccugguuc

SEQ ID NO: 2596 - RNA, 19 nt, Artificial Sequence
  Synthetic
gaggccauccgaguaaggu

SEQ ID NO: 2597 - RNA, 19 nt, Artificial Sequence
  Synthetic
ugccagcagaggggcaggg

SEQ ID NO: 2598 - RNA, 19 nt, Artificial Sequence
  Synthetic
cuccccuugcccaggcugu

SEQ ID NO: 2599 - RNA, 19 nt, Artificial Sequence
  Synthetic
cucugcagggaccaccuuc

SEQ ID NO: 2600 - RNA, 19 nt, Artificial Sequence
  Synthetic
cucaccagccuggagcccc

SEQ ID NO: 2601 - RNA, 19 nt, Artificial Sequence
  Synthetic
ccugacagcaggggggcuc

SEQ ID NO: 2602 - RNA, 19 nt, Artificial Sequence
  Synthetic
uggcugggaaaaucugguc

SEQ ID NO: 2603 - RNA, 19 nt, Artificial Sequence
  Synthetic
uccccgcagcaugcuggau

SEQ ID NO: 2604 - RNA, 19 nt, Artificial Sequence
  Synthetic
gugagccucugccccuucu

SEQ ID NO: 2605 - RNA, 19 nt, Artificial Sequence
  Synthetic
aaaggccccaggagggagg

SEQ ID NO: 2606 - RNA, 19 nt, Artificial Sequence
  Synthetic
uccccaggauccaaaacaa

SEQ ID NO: 2607 - RNA, 19 nt, Artificial Sequence
  Synthetic
gaaccuccauucucaccau

SEQ ID NO: 2608 - RNA, 19 nt, Artificial Sequence
  Synthetic
cuggccuuaccccuucuag

SEQ ID NO: 2609 - RNA, 19 nt, Artificial Sequence
  Synthetic
cuccuggaucccuggguuc

SEQ ID NO: 2610 - RNA, 19 nt, Artificial Sequence
  Synthetic
gcuccagcugagagccgac

SEQ ID NO: 2611 - RNA, 19 nt, Artificial Sequence
  Synthetic
agcccagaagguauggaag

SEQ ID NO: 2612 - RNA, 19 nt, Artificial Sequence
  Synthetic
cugguggucagcaaaggga

SEQ ID NO: 2613 - RNA, 19 nt, Artificial Sequence
  Synthetic
ggucuuagcucccuugggc

SEQ ID NO: 2614 - RNA, 19 nt, Artificial Sequence
  Synthetic
agcgcccagcccccuccug

SEQ ID NO: 2615 - RNA, 19 nt, Artificial Sequence
  Synthetic
cugggaaagagaagggaca

SEQ ID NO: 2616 - RNA, 19 nt, Artificial Sequence
  Synthetic
cagccccuggcagggcucc

SEQ ID NO: 2617 - RNA, 19 nt, Artificial Sequence
  Synthetic
ggaagccuuguaggcccac

SEQ ID NO: 2618 - RNA, 19 nt, Artificial Sequence
  Synthetic
ggcuggauggcauccccug

SEQ ID NO: 2619 - RNA, 19 nt, Artificial Sequence
  Synthetic
caucuuugguuuccuacag

SEQ ID NO: 2620 - RNA, 19 nt, Artificial Sequence
  Synthetic
ccccuaggagccacuuccc

SEQ ID NO: 2621 - RNA, 19 nt, Artificial Sequence
  Synthetic
gaggaaggaagagucagcc

SEQ ID NO: 2622 - RNA, 19 nt, Artificial Sequence
  Synthetic
ugugguacuggggaggagg

SEQ ID NO: 2623 - RNA, 19 nt, Artificial Sequence
  Synthetic
agaaggagagaaaguauau

SEQ ID NO: 2624 - RNA, 19 nt, Artificial Sequence
  Synthetic
ugguggggcccuggagaua

SEQ ID NO: 2625 - RNA, 19 nt, Artificial Sequence
  Synthetic
auaaauauguaaacagauu

SEQ ID NO: 2626 - RNA, 19 nt, Artificial Sequence
  Synthetic
ucaggcccccauaggauaa

SEQ ID NO: 2627 - RNA, 19 nt, Artificial Sequence
  Synthetic
uggcucccucaauccugcu

SEQ ID NO: 2628 - RNA, 19 nt, Artificial Sequence
  Synthetic
ggacuccugccccuccccu

SEQ ID NO: 2629 - RNA, 19 nt, Artificial Sequence
  Synthetic
uaugaaccgauggugcugg

SEQ ID NO: 2630 - RNA, 19 nt, Artificial Sequence
  Synthetic
acaaacacacaagcacacu

SEQ ID NO: 2631 - RNA, 19 nt, Artificial Sequence
  Synthetic
cccccaggaggaucuaaaa

SEQ ID NO: 2632 - RNA, 19 nt, Artificial Sequence
  Synthetic
gccuggccccauccccauc

SEQ ID NO: 2633 - RNA, 19 nt, Artificial Sequence
  Synthetic
agaggccuaguacacugag

SEQ ID NO: 2634 - RNA, 19 nt, Artificial Sequence
  Synthetic
gccuggggcucagcacaga

SEQ ID NO: 2635 - RNA, 19 nt, Artificial Sequence
  Synthetic
guggguaaggggccgggag

SEQ ID NO: 2636 - RNA, 19 nt, Artificial Sequence
  Synthetic
accagccacagggagagag

SEQ ID NO: 2637 - RNA, 19 nt, Artificial Sequence
  Synthetic
gguuuacaugagaaccaga

SEQ ID NO: 2638 - RNA, 19 nt, Artificial Sequence
  Synthetic
gagacaaagcaaggagugg

SEQ ID NO: 2639 - RNA, 19 nt, Artificial Sequence
  Synthetic
cugaaauccauauccaggg

SEQ ID NO: 2640 - RNA, 19 nt, Artificial Sequence
  Synthetic
ggguuacaaaauacuuaac

SEQ ID NO: 2641 - RNA, 19 nt, Artificial Sequence
  Synthetic
aaggacacacaguguaacg

SEQ ID NO: 2642 - RNA, 19 nt, Artificial Sequence
  Synthetic
aaacaaguuuauuuacaca

SEQ ID NO: 2643 - RNA, 23 nt, Artificial Sequence
  Synthetic
cagcaugcggacgguaggcaagc

SEQ ID NO: 2644 - RNA, 23 nt, Artificial Sequence
  Synthetic
aagucacacauucaacaaggugu

SEQ ID NO: 2645 - RNA, 23 nt, Artificial Sequence
  Synthetic
ggcccagagccggcaugaacucu

SEQ ID NO: 2646 - RNA, 23 nt, Artificial Sequence
  Synthetic
gggacgccucccuccuacaaacu

SEQ ID NO: 2647 - RNA, 23 nt, Artificial Sequence
  Synthetic
gucgcaaggaugggacuguuauu

SEQ ID NO: 2648 - RNA, 23 nt, Artificial Sequence
  Synthetic
gggcgucguccguguguaacagc

SEQ ID NO: 2649 - RNA, 23 nt, Artificial Sequence
  Synthetic
cacgcugaccggcaaguucauga

SEQ ID NO: 2650 - RNA, 23 nt, Artificial Sequence
  Synthetic
agccuggugcuggauacaaaaaa

SEQ ID NO: 2651 - DNA, 21 bp, Artificial Sequence
  Synthetic
gcaugcggacgguaggcaatt

SEQ ID NO: 2652 - DNA, 21 bp, Artificial Sequence
  Synthetic
gucacacauucaacaaggutt

SEQ ID NO: 2653 - DNA, 21 bp, Artificial Sequence
  Synthetic
cccagagccggcaugaacutt

SEQ ID NO: 2654 - DNA, 21 bp, Artificial Sequence
  Synthetic
gacgccucccuccuacaaatt

SEQ ID NO: 2655 - DNA, 21 bp, Artificial Sequence
  Synthetic
cgcaaggaugggacuguuatt

SEQ ID NO: 2656 - DNA, 21 bp, Artificial Sequence
  Synthetic
gcgucguccguguguaacatt

SEQ ID NO: 2657 - DNA, 21 bp, Artificial Sequence
  Synthetic
cgcugaccggcaaguucautt

SEQ ID NO: 2658 - DNA, 21 bp, Artificial Sequence
  Synthetic
ccuggugcuggauacaaaatt

SEQ ID NO: 2659 - DNA, 21 bp, Artificial Sequence
  Synthetic
uugccuaccguccgcaugctt

SEQ ID NO: 2660 - DNA, 21 bp, Artificial Sequence
  Synthetic
accuuguugaaugugugactt

SEQ ID NO: 2661 - DNA, 21 bp, Artificial Sequence
  Synthetic
aguucaugccggcucugggtt

SEQ ID NO: 2662 - DNA, 21 bp, Artificial Sequence
  Synthetic
uuuguaggagggaggcguctt

SEQ ID NO: 2663 - DNA, 21 bp, Artificial Sequence
  Synthetic
uaacagucccauccuugcgtt

SEQ ID NO: 2664 - DNA, 21 bp, Artificial Sequence
  Synthetic
uguuacacacggacgacgctt

SEQ ID NO: 2665 - DNA, 21 bp, Artificial Sequence
  Synthetic
augaacuugccggucagcgtt

SEQ ID NO: 2666 - DNA, 21 bp, Artificial Sequence
  Synthetic
uuuuguauccagcaccaggtt

SEQ ID NO: 2667 - DNA, 21 bp, Artificial Sequence
  Synthetic
  misc_feature (1)..(1): 5'-3 attached inverted deoxyabasic moiety.
  misc_feature (2)..(2): 2'-deoxy-2'-fluoro
  misc_feature (4)..(4): 2'-deoxy-2'-fluoro
  misc_feature (6)..(6): 2'-deoxy-2'-fluoro
  misc_feature (10)..(10): 2'-deoxy-2'-fluoro
  misc_feature (13)..(13): 2'-deoxy-2'-fluoro
  misc_feature (17)..(17): 2'-deoxy-2'-fluoro
  misc_feature (21)..(21): 3'-3 attached inverted deoxyabasic moiety.
gcaugcggacgguaggcaatt

SEQ ID NO: 2668 - DNA, 21 bp, Artificial Sequence
  Synthetic
  misc_feature (1)..(1): 5'-3 attached inverted deoxyabasic moiety.
  misc_feature (2)..(3): 2'-deoxy-2'-fluoro
  misc_feature (5)..(5): 2'-deoxy-2'-fluoro
  misc_feature (7)..(7): 2'-deoxy-2'-fluoro
  misc_feature (9)..(11): 2'-deoxy-2'-fluoro
  misc_feature (14)..(14): 2'-deoxy-2'-fluoro
  misc_feature (19)..(19): 2'-deoxy-2'-fluoro
  misc_feature (21)..(21): 3'-3 attached inverted deoxyabasic moiety.
gucacacauucaacaaggutt

SEQ ID NO: 2669 - DNA, 21 bp, Artificial Sequence
  Synthetic
  misc_feature (1)..(1): 5'-3 attached inverted deoxyabasic moiety.
  misc_feature (1)..(3): 2'-deoxy-2'-fluoro
  misc_feature (8)..(9): 2'-deoxy-2'-fluoro
  misc_feature (12)..(12): 2'-deoxy-2'-fluoro
  misc_feature (14)..(14): 2'-deoxy-2'-fluoro
  misc_feature (18)..(19): 2'-deoxy-2'-fluoro
  misc_feature (21)..(21): 3'-3 attached inverted deoxyabasic moiety.
cccagagccggcaugaacutt

SEQ ID NO: 2670 - DNA, 21 bp, Artificial Sequence
  Synthetic
  misc_feature (1)..(1): 5'-3 attached inverted deoxyabasic moiety.
  misc_feature (3)..(3): 2'-deoxy-2'-fluoro
  misc_feature (5)..(14): 2'-deoxy-2'-fluoro
  misc_feature (16)..(16): 2'-deoxy-2'-fluoro
  misc_feature (21)..(21): 3'-3 attached inverted deoxyabasic moiety.
gacgccucccuccuacaaatt

SEQ ID NO: 2671 - DNA, 21 bp, Artificial Sequence
  Synthetic
  misc_feature (1)..(1): 5'-3 attached inverted deoxyabasic moiety.
  misc_feature (1)..(1): 2'-deoxy-2'-fluoro
  misc_feature (3)..(3): 2'-deoxy-2'-fluoro
  misc_feature (9)..(9): 2'-deoxy-2'-fluoro
  misc_feature (14)..(15): 2'-deoxy-2'-fluoro
  misc_feature (17)..(18): 2'-deoxy-2'-fluoro
  misc_feature (21)..(21): 3'-3 attached inverted deoxyabasic moiety.
cgcaaggaugggacuguuatt

SEQ ID NO: 2672 - DNA, 21 bp, Artificial Sequence
  Synthetic
  misc_feature (1)..(1): 5'-3 attached inverted deoxyabasic moiety.
  misc_feature (2)..(2): 2'-deoxy-2'-fluoro
  misc_feature (4)..(5): 2'-deoxy-2'-fluoro
  misc_feature (7)..(9): 2'-deoxy-2'-fluoro
  misc_feature (11)..(11): 2'-deoxy-2'-fluoro
  misc_feature (13)..(13): 2'-deoxy-2'-fluoro
  misc_feature (15)..(15): 2'-deoxy-2'-fluoro
  misc_feature (18)..(18): 2'-deoxy-2'-fluoro
  misc_feature (21)..(21): 3'-3 attached inverted deoxyabasic moiety.
gcgucguccguguguaacatt

SEQ ID NO: 2673 - DNA, 21 bp, Artificial Sequence
  Synthetic
  misc_feature (1)..(1): 5'-3 attached inverted deoxyabasic moiety.
  misc_feature (1)..(1): 2'-deoxy-2'-fluoro
  misc_feature (3)..(4): 2'-deoxy-2'-fluoro
  misc_feature (7)..(8): 2'-deoxy-2'-fluoro
  misc_feature (11)..(11): 2'-deoxy-2'-fluoro
  misc_feature (15)..(17): 2'-deoxy-2'-fluoro
  misc_feature (19)..(19): 2'-deoxy-2'-fluoro
  misc_feature (21)..(21): 3'-3 attached inverted deoxyabasic moiety.
cgcugaccggcaaguucautt

SEQ ID NO: 2674 - DNA, 21 bp, Artificial Sequence
  Synthetic
  misc_feature (1)..(1): 5'-3 attached inverted deoxyabasic moiety.
  misc_feature (1)..(3): 2'-deoxy-2'-fluoro
  misc_feature (6)..(6): 2'-deoxy-2'-fluoro
  misc_feature (8)..(9): 2'-deoxy-2'-fluoro
  misc_feature (13)..(13): 2'-deoxy-2'-fluoro
  misc_feature (15)..(15): 2'-deoxy-2'-fluoro
  misc_feature (21)..(21): 3'-3 attached inverted deoxyabasic moiety.
ccuggugcuggauacaaaatt

SEQ ID NO: 2675 - DNA, 21 bp, Artificial Sequence
  Synthetic
  misc_feature (1)..(2): 2'-deoxy-2'-fluoro
  misc_feature (4)..(6): 2'-deoxy-2'-fluoro
  misc_feature (8)..(9): 2'-deoxy-2'-fluoro
  misc_feature (11)..(13): 2'-deoxy-2'-fluoro
  misc_feature (15)..(15): 2'-deoxy-2'-fluoro
  misc_feature (17)..(17): 2'-deoxy-2'-fluoro
  misc_feature (19)..(19): 2'-deoxy-2'-fluoro
  misc_feature (20)..(21): phosphorothioate linkage
uugccuaccguccgcaugctt

SEQ ID NO: 2676 - DNA, 21 bp, Artificial Sequence
  Synthetic
  misc_feature (2)..(5): 2'-deoxy-2'-fluoro
  misc_feature (7)..(8): 2'-deoxy-2'-fluoro
  misc_feature (12)..(12): 2'-deoxy-2'-fluoro
  misc_feature (14)..(14): 2'-deoxy-2'-fluoro
  misc_feature (16)..(16): 2'-deoxy-2'-fluoro
  misc_feature (19)..(19): 2'-deoxy-2'-fluoro
  misc_feature (20)..(21): phosphorothioate linkage
accuuguugaaugugugactt

SEQ ID NO: 2677 - DNA, 21 bp, Artificial Sequence
  Synthetic
  misc_feature (3)..(5): 2'-deoxy-2'-fluoro
  misc_feature (7)..(7): 2'-deoxy-2'-fluoro
  misc_feature (9)..(10): 2'-deoxy-2'-fluoro
  misc_feature (13)..(16): 2'-deoxy-2'-fluoro
  misc_feature (20)..(21): phosphorothioate linkage
aguucaugccggcucugggtt

SEQ ID NO: 2678 - DNA, 21 bp, Artificial Sequence
  Synthetic
  misc_feature (1)..(3): 2'-deoxy-2'-fluoro
  misc_feature (5)..(5): 2'-deoxy-2'-fluoro
  misc_feature (16)..(16): 2'-deoxy-2'-fluoro
  misc_feature (18)..(19): 2'-deoxy-2'-fluoro
  misc_feature (20)..(21): phosphorothioate linkage
uuuguaggagggaggcguctt

SEQ ID NO: 2679 - DNA, 21 bp, Artificial Sequence
  Synthetic
  misc_feature (1)..(1): 2'-deoxy-2'-fluoro
  misc_feature (4)..(4): 2'-deoxy-2'-fluoro
  misc_feature (7)..(10): 2'-deoxy-2'-fluoro
  misc_feature (12)..(16): 2'-deoxy-2'-fluoro
  misc_feature (18)..(18): 2'-deoxy-2'-fluoro
  misc_feature (20)..(21): phosphorothioate linkage
uaacagucccauccuugcgtt

SEQ ID NO: 2680 - DNA, 21 bp, Artificial Sequence
  Synthetic
  misc_feature (1)..(1): 2'-deoxy-2'-fluoro
  misc_feature (3)..(4): 2'-deoxy-2'-fluoro
  misc_feature (6)..(6): 2'-deoxy-2'-fluoro
  misc_feature (8)..(8): 2'-deoxy-2'-fluoro
  misc_feature (10)..(10): 2'-deoxy-2'-fluoro
  misc_feature (14)..(14): 2'-deoxy-2'-fluoro
  misc_feature (17)..(17): 2'-deoxy-2'-fluoro
  misc_feature (19)..(19): 2'-deoxy-2'-fluoro
  misc_feature (20)..(21): phosphorothioate linkage
uguuacacacggacgacgctt

SEQ ID NO: 2681 - DNA, 21 bp, Artificial Sequence
  Synthetic
  misc_feature (2)..(2): 2'-deoxy-2'-fluoro
  misc_feature (6)..(8): 2'-deoxy-2'-fluoro
  misc_feature (10)..(11): 2'-deoxy-2'-fluoro
  misc_feature (14)..(15): 2'-deoxy-2'-fluoro
  misc_feature (18)..(18): 2'-deoxy-2'-fluoro
  misc_feature (20)..(21): phosphorothioate linkage
augaacuugccggucagcgtt

SEQ ID NO: 2682 - DNA, 21 bp, Artificial Sequence
  Synthetic
  misc_feature (1)..(4): 2'-deoxy-2'-fluoro
  misc_feature (6)..(6): 2'-deoxy-2'-fluoro
  misc_feature (8)..(10): 2'-deoxy-2'-fluoro
  misc_feature (13)..(13): 2'-deoxy-2'-fluoro
  misc_feature (15)..(16): 2'-deoxy-2'-fluoro
  misc_feature (20)..(21): phosphorothioate linkage
uuuuguauccagcaccaggtt

SEQ ID NO: 2683 - DNA, 21 bp, Artificial Sequence
  Synthetic
  misc_feature (1)..(1): 5'-3 attached inverted deoxyabasic moiety.
  misc_feature (1)..(1): deoxy
  misc_feature (2)..(2): 2'-deoxy-2'-fluoro
  misc_feature (3)..(3): deoxy
  misc_feature (4)..(4): 2'-deoxy-2'-fluoro
  misc_feature (5)..(5): deoxy
  misc_feature (6)..(6): 2'-deoxy-2'-fluoro
  misc_feature (7)..(9): deoxy
  misc_feature (10)..(10): 2'-deoxy-2'-fluoro
  misc_feature (11)..(12): deoxy
  misc_feature (13)..(13): 2'-deoxy-2'-fluoro
  misc_feature (14)..(16): deoxy
  misc_feature (17)..(17): 2'-deoxy-2'-fluoro
  misc_feature (18)..(19): deoxy
  misc_feature (21)..(21): 3'-3 attached inverted deoxyabasic moiety.
gcaugcggacgguaggcaatt

SEQ ID NO: 2684 - DNA, 21 bp, Artificial Sequence
  Synthetic
  misc_feature (1)..(1): 5'-3 attached inverted deoxyabasic moiety.
  misc_feature (1)..(1): deoxy
  misc_feature (2)..(3): 2'-deoxy-2'-fluoro
  misc_feature (4)..(4): deoxy
  misc_feature (5)..(5): 2'-deoxy-2'-fluoro
  misc_feature (6)..(6): deoxy
  misc_feature (7)..(7): 2'-deoxy-2'-fluoro
  misc_feature (8)..(8): deoxy
  misc_feature (9)..(11): 2'-deoxy-2'-fluoro
  misc_feature (12)..(13): deoxy
  misc_feature (14)..(14): 2'-deoxy-2'-fluoro
  misc_feature (15)..(18): deoxy
  misc_feature (19)..(19): 2'-deoxy-2'-fluoro
  misc_feature (21)..(21): 3'-3 attached inverted deoxyabasic moiety.
gucacacauucaacaaggutt

SEQ ID NO: 2685 - DNA, 21 bp, Artificial Sequence
  Synthetic
  misc_feature (1)..(1): 5'-3 attached inverted deoxyabasic moiety.
  misc_feature (1)..(3): 2'-deoxy-2'-fluoro
  misc_feature (4)..(7): deoxy
  misc_feature (8)..(9): 2'-deoxy-2'-fluoro
  misc_feature (10)..(11): deoxy
  misc_feature (12)..(12): 2'-deoxy-2'-fluoro
  misc_feature (13)..(13): deoxy
  misc_feature (14)..(14): 2'-deoxy-2'-fluoro
  misc_feature (15)..(17): deoxy
  misc_feature (18)..(19): 2'-deoxy-2'-fluoro
  misc_feature (21)..(21): 3'-3 attached inverted deoxyabasic moiety.
cccagagccggcaugaacutt

SEQ ID NO: 2686 - DNA, 21 bp, Artificial Sequence
  Synthetic
  misc_feature (1)..(1): 5'-3 attached inverted deoxyabasic moiety.
  misc_feature (1)..(2): deoxy
  misc_feature (3)..(3): 2'-deoxy-2'-fluoro
  misc_feature (4)..(4): deoxy
  misc_feature (5)..(14): 2'-deoxy-2'-fluoro
  misc_feature (15)..(15): deoxy
  misc_feature (16)..(16): 2'-deoxy-2'-fluoro
  misc_feature (17)..(19): deoxy
  misc_feature (21)..(21): 3'-3 attached inverted deoxyabasic moiety.
gacgccucccuccuacaaatt

SEQ ID NO: 2687 - DNA, 21 bp, Artificial Sequence
  Synthetic
  misc_feature (1)..(1): 5'-3 attached inverted deoxyabasic moiety.
  misc_feature (1)..(1): 2'-deoxy-2'-fluoro
  misc_feature (2)..(2): deoxy
  misc_feature (3)..(3): 2'-deoxy-2'-fluoro
  misc_feature (4)..(8): deoxy
  misc_feature (9)..(9): 2'-deoxy-2'-fluoro
  misc_feature (10)..(13): deoxy
  misc_feature (14)..(15): 2'-deoxy-2'-fluoro
  misc_feature (16)..(16): deoxy
  misc_feature (17)..(18): 2'-deoxy-2'-fluoro
  misc_feature (19)..(19): deoxy
  misc_feature (21)..(21): 3'-3 attached inverted deoxyabasic moiety.
cgcaaggaugggacuguuatt

SEQ ID NO: 2688 - DNA, 21 bp, Artificial Sequence
  Synthetic
  misc_feature (1)..(1): 5'-3 attached inverted deoxyabasic moiety.
  misc_feature (1)..(1): deoxy
  misc_feature (2)..(2): 2'-deoxy-2'-fluoro
  misc_feature (3)..(3): deoxy
  misc_feature (4)..(5): 2'-deoxy-2'-fluoro
  misc_feature (6)..(6): deoxy
  misc_feature (7)..(9): 2'-deoxy-2'-fluoro
  misc_feature (10)..(10): deoxy
  misc_feature (11)..(11): 2'-deoxy-2'-fluoro
  misc_feature (12)..(12): deoxy
  misc_feature (13)..(13): 2'-deoxy-2'-fluoro
  misc_feature (14)..(14): deoxy
  misc_feature (15)..(15): 2'-deoxy-2'-fluoro
  misc_feature (16)..(17): deoxy
  misc_feature (18)..(18): 2'-deoxy-2'-fluoro
  misc_feature (19)..(19): deoxy
  misc_feature (21)..(21): 3'-3 attached inverted deoxyabasic moiety.
gcgucguccguguguaacatt

SEQ ID NO: 2689 - DNA, 21 bp, Artificial Sequence
  Synthetic
  misc_feature (1)..(1): 5'-3 attached inverted deoxyabasic moiety.
  misc_feature (1)..(1): 2'-deoxy-2'-fluoro
  misc_feature (2)..(2): deoxy
  misc_feature (3)..(4): 2'-deoxy-2'-fluoro
  misc_feature (5)..(6): deoxy
  misc_feature (7)..(8): 2'-deoxy-2'-fluoro
  misc_feature (9)..(10): deoxy
  misc_feature (11)..(11): 2'-deoxy-2'-fluoro
  misc_feature (12)..(14): deoxy
  misc_feature (15)..(17): 2'-deoxy-2'-fluoro
  misc_feature (18)..(18): deoxy
  misc_feature (19)..(19): 2'-deoxy-2'-fluoro
  misc_feature (21)..(21): 3'-3 attached inverted deoxyabasic moiety.
cgcugaccggcaaguucautt

SEQ ID NO: 2690 - DNA, 21 bp, Artificial Sequence
  Synthetic
  misc_feature (1)..(1): 5'-3 attached inverted deoxyabasic moiety.
  misc_feature (1)..(3): 2'-deoxy-2'-fluoro
  misc_feature (4)..(5): deoxy
  misc_feature (6)..(6): 2'-deoxy-2'-fluoro
  misc_feature (7)..(7): deoxy
  misc_feature (8)..(9): 2'-deoxy-2'-fluoro
  misc_feature (10)..(12): deoxy
  misc_feature (13)..(13): 2'-deoxy-2'-fluoro
  misc_feature (14)..(14): deoxy
  misc_feature (15)..(15): 2'-deoxy-2'-fluoro
  misc_feature (16)..(19): deoxy
  misc_feature (21)..(21): 3'-3 attached inverted deoxyabasic moiety.
ccuggugcuggauacaaaatt

SEQ ID NO: 2691 - DNA, 21 bp, Artificial Sequence
  Synthetic
  misc_feature (1)..(2): 2'-deoxy-2'-fluoro
  misc_feature (3)..(3): deoxy
  misc_feature (4)..(6): 2'-deoxy-2'-fluoro
  misc_feature (7)..(7): deoxy
  misc_feature (8)..(9): 2'-deoxy-2'-fluoro
  misc_feature (10)..(10): deoxy
  misc_feature (11)..(13): 2'-deoxy-2'-fluoro
  misc_feature (14)..(14): deoxy
  misc_feature (15)..(15): 2'-deoxy-2'-fluoro
  misc_feature (16)..(16): deoxy
  misc_feature (17)..(17): 2'-deoxy-2'-fluoro
  misc_feature (18)..(18): deoxy
  misc_feature (19)..(19): 2'-deoxy-2'-fluoro
  misc_feature (20)..(21): phosphorothioate linkage
uugccuaccguccgcaugctt

SEQ ID NO: 2692 - DNA, 21 bp, Artificial Sequence
  Synthetic
  misc_feature (1)..(1): deoxy
  misc_feature (2)..(5): 2'-deoxy-2'-fluoro
  misc_feature (6)..(6): deoxy
  misc_feature (7)..(8): 2'-deoxy-2'-fluoro
  misc_feature (9)..(11): deoxy
  misc_feature (12)..(12): 2'-deoxy-2'-fluoro
  misc_feature (13)..(13): deoxy
  misc_feature (14)..(14): 2'-deoxy-2'-fluoro
  misc_feature (15)..(15): deoxy
  misc_feature (16)..(16): 2'-deoxy-2'-fluoro
  misc_feature (17)..(18): deoxy
  misc_feature (19)..(19): 2'-deoxy-2'-fluoro
  misc_feature (20)..(21): phosphorothioate linkage
accuuguugaaugugugactt

SEQ ID NO: 2693 - DNA, 21 bp, Artificial Sequence
  Synthetic
  misc_feature (1)..(2): deoxy
  misc_feature (3)..(5): 2'-deoxy-2'-fluoro
  misc_feature (6)..(6): deoxy
  misc_feature (7)..(7): 2'-deoxy-2'-fluoro
  misc_feature (8)..(8): deoxy
  misc_feature (9)..(10): 2'-deoxy-2'-fluoro
  misc_feature (11)..(12): deoxy
  misc_feature (13)..(16): 2'-deoxy-2'-fluoro
  misc_feature (17)..(19): deoxy
  misc_feature (20)..(21): phosphorothioate linkage
aguucaugccggcucugggtt

SEQ ID NO: 2694 - DNA, 21 bp, Artificial Sequence
  Synthetic
  misc_feature (1)..(3): 2'-deoxy-2'-fluoro
  misc_feature (4)..(4): deoxy
  misc_feature (5)..(5): 2'-deoxy-2'-fluoro
  misc_feature (6)..(15): deoxy
  misc_feature (16)..(16): 2'-deoxy-2'-fluoro
  misc_feature (17)..(17): deoxy
  misc_feature (18)..(19): 2'-deoxy-2'-fluoro
  misc_feature (20)..(21): phosphorothioate linkage
uuuguaggagggaggcguctt

SEQ ID NO: 2695 - DNA, 21 bp, Artificial Sequence
  Synthetic
  misc_feature (1)..(1): 2'-deoxy-2'-fluoro
  misc_feature (2)..(3): deoxy
  misc_feature (4)..(4): 2'-deoxy-2'-fluoro
  misc_feature (5)..(6): deoxy
  misc_feature (7)..(10): 2'-deoxy-2'-fluoro
  misc_feature (11)..(11): deoxy
  misc_feature (12)..(16): 2'-deoxy-2'-fluoro
  misc_feature (17)..(17): deoxy
  misc_feature (18)..(18): 2'-deoxy-2'-fluoro
  misc_feature (19)..(19): deoxy
  misc_feature (20)..(21): phosphorothioate linkage
uaacagucccauccuugcgtt

SEQ ID NO: 2696 - DNA, 21 bp, Artificial Sequence
  Synthetic
  misc_feature (1)..(1): 2'-deoxy-2'-fluoro
  misc_feature (2)..(2): deoxy
  misc_feature (3)..(4): 2'-deoxy-2'-fluoro
  misc_feature (5)..(5): deoxy
  misc_feature (6)..(6): 2'-deoxy-2'-fluoro
  misc_feature (7)..(7): deoxy
  misc_feature (8)..(8): 2'-deoxy-2'-fluoro
  misc_feature (9)..(9): deoxy
  misc_feature (10)..(10): 2'-deoxy-2'-fluoro
  misc_feature (11)..(13): deoxy
  misc_feature (14)..(14): 2'-deoxy-2'-fluoro
  misc_feature (15)..(16): deoxy
  misc_feature (17)..(17): 2'-deoxy-2'-fluoro
  misc_feature (18)..(18): deoxy
  misc_feature (19)..(19): 2'-deoxy-2'-fluoro
  misc_feature (20)..(21): phosphorothioate linkage
uguuacacacggacgacgctt

SEQ ID NO: 2697 - DNA, 21 bp, Artificial Sequence
  Synthetic
  misc_feature (1)..(1): deoxy
  misc_feature (2)..(2): 2'-deoxy-2'-fluoro
  misc_feature (3)..(5): deoxy
  misc_feature (6)..(8): 2'-deoxy-2'-fluoro
  misc_feature (9)..(9): deoxy
  misc_feature (10)..(11): 2'-deoxy-2'-fluoro
  misc_feature (12)..(13): deoxy
  misc_feature (14)..(15): 2'-deoxy-2'-fluoro
  misc_feature (16)..(17): deoxy
  misc_feature (18)..(18): 2'-deoxy-2'-fluoro
  misc_feature (19)..(19): deoxy
  misc_feature (20)..(21): phosphorothioate linkage
augaacuugccggucagcgtt

SEQ ID NO: 2698 - DNA, 21 bp, Artificial Sequence
  Synthetic
  misc_feature (1)..(4): 2'-deoxy-2'-fluoro
  misc_feature (5)..(5): deoxy
  misc_feature (6)..(6): 2'-deoxy-2'-fluoro
  misc_feature (7)..(7): deoxy
  misc_feature (8)..(10): 2'-deoxy-2'-fluoro
  misc_feature (11)..(12): deoxy
  misc_feature (13)..(13): 2'-deoxy-2'-fluoro
  misc_feature (14)..(14): deoxy
  misc_feature (15)..(16): 2'-deoxy-2'-fluoro
  misc_feature (17)..(19): deoxy
  misc_feature (20)..(21): phosphorothioate linkage
uuuuguauccagcaccaggtt

SEQ ID NO: 2699 - DNA, 21 bp, Artificial Sequence
  Synthetic
  misc_feature (1)..(1): 5'-3 attached inverted deoxyabasic moiety.
  misc_feature (1)..(1): 2'-O-methyl
  misc_feature (2)..(2): 2'-deoxy-2'-fluoro
  misc_feature (3)..(3): 2'-O-methyl
  misc_feature (4)..(4): 2'-deoxy-2'-fluoro
  misc_feature (5)..(5): 2'-O-methyl
  misc_feature (6)..(6): 2'-deoxy-2'-fluoro
  misc_feature (7)..(9): 2'-O-methyl
  misc_feature (10)..(10): 2'-deoxy-2'-fluoro
  misc_feature (11)..(12): 2'-O-methyl
  misc_feature (13)..(13): 2'-deoxy-2'-fluoro
  misc_feature (14)..(16): 2'-O-methyl
  misc_feature (17)..(17): 2'-deoxy-2'-fluoro
  misc_feature (18)..(19): 2'-O-methyl
  misc_feature (21)..(21): 3'-3 attached inverted deoxyabasic moiety.
gcaugcggacgguaggcaatt

SEQ ID NO: 2700 - DNA, 21 bp, Artificial Sequence
  Synthetic
  misc_feature (1)..(1): 5'-3 attached inverted deoxyabasic moiety.
  misc_feature (1)..(1): 2'-O-methyl
  misc_feature (2)..(3): 2'-deoxy-2'-fluoro
  misc_feature (4)..(4): 2'-O-methyl
  misc_feature (5)..(5): 2'-deoxy-2'-fluoro
  misc_feature (6)..(6): 2'-O-methyl
  misc_feature (7)..(7): 2'-deoxy-2'-fluoro
  misc_feature (8)..(8): 2'-O-methyl
  misc_feature (9)..(11): 2'-deoxy-2'-fluoro
  misc_feature (12)..(13): 2'-O-methyl
  misc_feature (14)..(14): 2'-deoxy-2'-fluoro
  misc_feature (15)..(18): 2'-O-methyl
  misc_feature (19)..(19): 2'-deoxy-2'-fluoro
  misc_feature (21)..(21): 3'-3 attached inverted deoxyabasic moiety.
gucacacauucaacaaggutt

SEQ ID NO: 2701 - DNA, 21 bp, Artificial Sequence
  Synthetic
  misc_feature (1)..(1): 5'-3 attached inverted deoxyabasic moiety.
  misc_feature (1)..(3): 2'-deoxy-2'-fluoro
  misc_feature (4)..(7): 2'-O-methyl
  misc_feature (8)..(9): 2'-deoxy-2'-fluoro
  misc_feature (10)..(11): 2'-O-methyl
  misc_feature (12)..(12): 2'-deoxy-2'-fluoro
  misc_feature (13)..(13): 2'-O-methyl
  misc_feature (14)..(14): 2'-deoxy-2'-fluoro
  misc_feature (15)..(17): 2'-O-methyl
  misc_feature (18)..(19): 2'-deoxy-2'-fluoro
  misc_feature (21)..(21): 3'-3 attached inverted deoxyabasic moiety.
cccagagccggcaugaacutt

SEQ ID NO: 2702 - DNA, 21 bp, Artificial Sequence
  Synthetic
  misc_feature (1)..(1): 5'-3 attached inverted deoxyabasic moiety.
  misc_feature (1)..(2): 2'-O-methyl
  misc_feature (3)..(3): 2'-deoxy-2'-fluoro
  misc_feature (4)..(4): 2'-O-methyl
  misc_feature (5)..(14): 2'-deoxy-2'-fluoro
  misc_feature (15)..(15): 2'-O-methyl
  misc_feature (16)..(16): 2'-deoxy-2'-fluoro
  misc_feature (17)..(19): 2'-O-methyl
  misc_feature (21)..(21): 3'-3 attached inverted deoxyabasic moiety.
gacgccucccuccuacaaatt

SEQ ID NO: 2703 - DNA, 21 bp, Artificial Sequence
  Synthetic
  misc_feature (1)..(1): 5'-3 attached inverted deoxyabasic moiety.
  misc_feature (1)..(1): 2'-deoxy-2'-fluoro
  misc_feature (2)..(2): 2'-O-methyl
  misc_feature (3)..(3): 2'-deoxy-2'-fluoro
  misc_feature (4)..(8): 2'-O-methyl
  misc_feature (9)..(9): 2'-deoxy-2'-fluoro
  misc_feature (10)..(13): 2'-O-methyl
  misc_feature (14)..(15): 2'-deoxy-2'-fluoro
  misc_feature (16)..(16): 2'-O-methyl
  misc_feature (17)..(18): 2'-deoxy-2'-fluoro
  misc_feature (19)..(19): 2'-O-methyl
  misc_feature (21)..(21): 3'-3 attached inverted deoxyabasic moiety.
cgcaaggaugggacuguuatt

SEQ ID NO: 2704 - DNA, 21 bp, Artificial Sequence
  Synthetic
  misc_feature (1)..(1): 5'-3 attached inverted deoxyabasic moiety.
  misc_feature (1)..(1): 2'-O-methyl
  misc_feature (2)..(2): 2'-deoxy-2'-fluoro
  misc_feature (3)..(3): 2'-O-methyl
  misc_feature (4)..(5): 2'-deoxy-2'-fluoro
  misc_feature (6)..(6): 2'-O-methyl
  misc_feature (7)..(9): 2'-deoxy-2'-fluoro
  misc_feature (10)..(10): 2'-O-methyl
  misc_feature (11)..(11): 2'-deoxy-2'-fluoro
  misc_feature (12)..(12): 2'-O-methyl
  misc_feature (13)..(13): 2'-deoxy-2'-fluoro
  misc_feature (14)..(14): 2'-O-methyl
  misc_feature (15)..(15): 2'-deoxy-2'-fluoro
  misc_feature (16)..(17): 2'-O-methyl
  misc_feature (18)..(18): 2'-deoxy-2'-fluoro
  misc_feature (19)..(19): 2'-O-methyl
  misc_feature (21)..(21): 3'-3 attached inverted deoxyabasic moiety.
gcgucguccguguguaacatt

SEQ ID NO: 2705 - DNA, 21 bp, Artificial Sequence
  Synthetic
  misc_feature (1)..(1): 5'-3 attached inverted deoxyabasic moiety.
  misc_feature (1)..(1): 2'-deoxy-2'-fluoro
  misc_feature (2)..(2): 2'-O-methyl
  misc_feature (3)..(4): 2'-deoxy-2'-fluoro
  misc_feature (5)..(6): 2'-O-methyl
  misc_feature (7)..(8): 2'-deoxy-2'-fluoro
  misc_feature (9)..(10): 2'-O-methyl
  misc_feature (11)..(11): 2'-deoxy-2'-fluoro
  misc_feature (12)..(14): 2'-O-methyl
  misc_feature (15)..(17): 2'-deoxy-2'-fluoro
  misc_feature (18)..(18): 2'-O-methyl
  misc_feature (19)..(19): 2'-deoxy-2'-fluoro
  misc_feature (21)..(21): 3'-3 attached inverted deoxyabasic moiety.
cgcugaccggcaaguucautt

SEQ ID NO: 2706 - DNA, 21 bp, Artificial Sequence
  Synthetic
  misc_feature (1)..(1): 5'-3 attached inverted deoxyabasic moiety.
  misc_feature (1)..(3): 2'-deoxy-2'-fluoro
  misc_feature (4)..(5): 2'-O-methyl
  misc_feature (6)..(6): 2'-deoxy-2'-fluoro
  misc_feature (7)..(7): 2'-O-methyl
  misc_feature (8)..(9): 2'-deoxy-2'-fluoro
  misc_feature (10)..(12): 2'-O-methyl
  misc_feature (13)..(13): 2'-deoxy-2'-fluoro
  misc_feature (14)..(14): 2'-O-methyl
  misc_feature (15)..(15): 2'-deoxy-2'-fluoro
  misc_feature (16)..(19): 2'-O-methyl
  misc_feature (21)..(21): 3'-3 attached inverted deoxyabasic moiety.
ccuggugcuggauacaaaatt

SEQ ID NO: 2707 - DNA, 21 bp, Artificial Sequence
  Synthetic
  misc_feature (1)..(2): 2'-deoxy-2'-fluoro
  misc_feature (3)..(3): 2'-O-methyl
  misc_feature (4)..(6): 2'-deoxy-2'-fluoro
  misc_feature (7)..(7): 2'-O-methyl
  misc_feature (8)..(9): 2'-deoxy-2'-fluoro
  misc_feature (10)..(10): 2'-O-methyl
  misc_feature (11)..(13): 2'-deoxy-2'-fluoro
  misc_feature (14)..(14): 2'-O-methyl
  misc_feature (15)..(15): 2'-deoxy-2'-fluoro
  misc_feature (16)..(16): 2'-O-methyl
  misc_feature (17)..(17): 2'-deoxy-2'-fluoro
  misc_feature (18)..(18): 2'-O-methyl
  misc_feature (19)..(19): 2'-deoxy-2'-fluoro
  misc_feature (20)..(21): phosphorothioate linkage
uugccuaccguccgcaugctt

SEQ ID NO: 2708 - DNA, 21 bp, Artificial Sequence
  Synthetic
  misc_feature (1)..(1): 2'-O-methyl
  misc_feature (2)..(5): 2'-deoxy-2'-fluoro
  misc_feature (6)..(6): 2'-O-methyl
  misc_feature (7)..(8): 2'-deoxy-2'-fluoro
  misc_feature (9)..(11): 2'-O-methyl
  misc_feature (12)..(12): 2'-deoxy-2'-fluoro
  misc_feature (13)..(13): 2'-O-methyl
  misc_feature (14)..(14): 2'-deoxy-2'-fluoro
  misc_feature (15)..(15): 2'-O-methyl
  misc_feature (16)..(16): 2'-deoxy-2'-fluoro
  misc_feature (17)..(18): 2'-O-methyl
  misc_feature (19)..(19): 2'-deoxy-2'-fluoro
  misc_feature (20)..(21): phosphorothioate linkage
accuuguugaaugugugactt

SEQ ID NO: 2709 - DNA, 21 bp, Artificial Sequence
  Synthetic
  misc_feature (1)..(2): 2'-O-methyl
  misc_feature (3)..(5): 2'-deoxy-2'-fluoro
  misc_feature (6)..(6): 2'-O-methyl
  misc_feature (7)..(7): 2'-deoxy-2'-fluoro
  misc_feature (8)..(8): 2'-O-methyl
  misc_feature (9)..(10): 2'-deoxy-2'-fluoro
  misc_feature (11)..(12): 2'-O-methyl
  misc_feature (13)..(16): 2'-deoxy-2'-fluoro
  misc_feature (17)..(19): 2'-O-methyl
  misc_feature (20)..(21): phosphorothioate linkage
aguucaugccggcucugggtt

SEQ ID NO: 2710 - DNA, 21 bp, Artificial Sequence
  Synthetic
  misc_feature (1)..(3): 2'-deoxy-2'-fluoro
  misc_feature (4)..(4): 2'-O-methyl
  misc_feature (5)..(5): 2'-deoxy-2'-fluoro
  misc_feature (6)..(15): 2'-O-methyl
  misc_feature (16)..(16): 2'-deoxy-2'-fluoro
  misc_feature (17)..(17): 2'-O-methyl
  misc_feature (18)..(19): 2'-deoxy-2'-fluoro
  misc_feature (20)..(21): phosphorothioate linkage
uuuguaggagggaggcguctt

SEQ ID NO: 2711 - DNA, 21 bp, Artificial Sequence
  Synthetic
  misc_feature (1)..(1): 2'-deoxy-2'-fluoro
  misc_feature (2)..(3): 2'-O-methyl
  misc_feature (4)..(4): 2'-deoxy-2'-fluoro
  misc_feature (5)..(6): 2'-O-methyl
  misc_feature (7)..(10): 2'-deoxy-2'-fluoro
  misc_feature (11)..(11): 2'-O-methyl
  misc_feature (12)..(16): 2'-deoxy-2'-fluoro
  misc_feature (17)..(17): 2'-O-methyl
  misc_feature (18)..(18): 2'-deoxy-2'-fluoro
  misc_feature (19)..(19): 2'-O-methyl
  misc_feature (20)..(21): phosphorothioate linkage
uaacagucccauccuugcgtt

SEQ ID NO: 2712 - DNA, 21 bp, Artificial Sequence
  Synthetic
  misc_feature (1)..(1): 2'-deoxy-2'-fluoro
  misc_feature (2)..(2): 2'-O-methyl
  misc_feature (3)..(4): 2'-deoxy-2'-fluoro
  misc_feature (5)..(5): 2'-O-methyl
  misc_feature (6)..(6): 2'-deoxy-2'-fluoro
  misc_feature (7)..(7): 2'-O-methyl
  misc_feature (8)..(8): 2'-deoxy-2'-fluoro
  misc_feature (9)..(9): 2'-O-methyl
  misc_feature (10)..(10): 2'-deoxy-2'-fluoro
  misc_feature (11)..(13): 2'-O-methyl
  misc_feature (14)..(14): 2'-deoxy-2'-fluoro
  misc_feature (15)..(16): 2'-O-methyl
  misc_feature (17)..(17): 2'-deoxy-2'-fluoro
  misc_feature (18)..(18): 2'-O-methyl
  misc_feature (19)..(19): 2'-deoxy-2'-fluoro
  misc_feature (20)..(21): phosphorothioate linkage
uguuacacacggacgacgctt

SEQ ID NO: 2713 - DNA, 21 bp, Artificial Sequence
  Synthetic
  misc_feature (1)..(1): 2'-O-methyl
  misc_feature (2)..(2): 2'-deoxy-2'-fluoro
  misc_feature (3)..(5): 2'-O-methyl
  misc_feature (6)..(8): 2'-deoxy-2'-fluoro
  misc_feature (9)..(9): 2'-O-methyl
  misc_feature (10)..(11): 2'-deoxy-2'-fluoro
  misc_feature (12)..(13): 2'-O-methyl
  misc_feature (14)..(15): 2'-deoxy-2'-fluoro
  misc_feature (16)..(17): 2'-O-methyl
  misc_feature (18)..(18): 2'-deoxy-2'-fluoro
  misc_feature (19)..(19): 2'-O-methyl
  misc_feature (20)..(21): phosphorothioate linkage
augaacuugccggucagcgtt

SEQ ID NO: 2714 - DNA, 21 bp, Artificial Sequence
  Synthetic
  misc_feature (1)..(4): 2'-deoxy-2'-fluoro
  misc_feature (5)..(5): 2'-O-methyl
  misc_feature (6)..(6): 2'-deoxy-2'-fluoro
  misc_feature (7)..(7): 2'-O-methyl
  misc_feature (8)..(10): 2'-deoxy-2'-fluoro
  misc_feature (11)..(12): 2'-O-methyl
  misc_feature (13)..(13): 2'-deoxy-2'-fluoro
  misc_feature (14)..(14): 2'-O-methyl
  misc_feature (15)..(16): 2'-deoxy-2'-fluoro
  misc_feature (17)..(19): 2'-O-methyl
  misc_feature (20)..(21): phosphorothioate linkage
uuuuguauccagcaccaggtt

SEQ ID NO: 2715 - DNA, 21 bp, Artificial Sequence
  Synthetic
  misc_feature (1)..(1): 5'-3 attached inverted deoxyabasic moiety.
  misc_feature (21)..(21): 3'-3 attached inverted deoxyabasic moiety.
gcaugcggacgguaggcaatt

SEQ ID NO: 2716 - DNA, 21 bp, Artificial Sequence
  Synthetic
  misc_feature (1)..(1): 5'-3 attached inverted deoxyabasic moiety.
  misc_feature (21)..(21): 3'-3 attached inverted deoxyabasic moiety.
gucacacauucaacaaggutt

SEQ ID NO: 2717 - DNA, 21 bp, Artificial Sequence
  Synthetic
  misc_feature (1)..(1): 5'-3 attached inverted deoxyabasic moiety.
  misc_feature (21)..(21): 3'-3 attached inverted deoxyabasic moiety.
cccagagccggcaugaacutt

SEQ ID NO: 2718 - DNA, 21 bp, Artificial Sequence
  Synthetic
  misc_feature (1)..(1): 5'-3 attached inverted deoxyabasic moiety.
  misc_feature (21)..(21): 3'-3 attached inverted deoxyabasic moiety.
gacgccucccuccuacaaatt

SEQ ID NO: 2719 - DNA, 21 bp, Artificial Sequence
  Synthetic
  misc_feature (1)..(1): 5'-3 attached inverted deoxyabasic moiety.
  misc_feature (21)..(21): 3'-3 attached inverted deoxyabasic moiety.
cgcaaggaugggacuguuatt

SEQ ID NO: 2720 - DNA, 21 bp, Artificial Sequence
  Synthetic
  misc_feature (1)..(1): 5'-3 attached inverted deoxyabasic moiety.
  misc_feature (21)..(21): 3'-3 attached inverted deoxyabasic moiety.
gcgucguccguguguaacatt

SEQ ID NO: 2721 - DNA, 21 bp, Artificial Sequence
  Synthetic
  misc_feature (1)..(1): 5'-3 attached inverted deoxyabasic moiety.
  misc_feature (21)..(21): 3'-3 attached inverted deoxyabasic moiety.
cgcugaccggcaaguucautt

SEQ ID NO: 2722 - DNA, 21 bp, Artificial Sequence
  Synthetic
  misc_feature (1)..(1): 5'-3 attached inverted deoxyabasic moiety.
  misc_feature (21)..(21): 3'-3 attached inverted deoxyabasic moiety.
ccuggugcuggauacaaaatt

SEQ ID NO: 2723 - DNA, 21 bp, Artificial Sequence
  Synthetic
  misc_feature (20)..(21): phosphorothioate linkage
uugccuaccguccgcaugctt

SEQ ID NO: 2724 - DNA, 21 bp, Artificial Sequence
  Synthetic
  misc_feature (20)..(21): phosphorothioate linkage
accuuguugaaugugugactt

SEQ ID NO: 2725 - DNA, 21 bp, Artificial Sequence
  Synthetic
  misc_feature (20)..(21): phosphorothioate linkage
aguucaugccggcucugggtt

SEQ ID NO: 2726 - DNA, 21 bp, Artificial Sequence
  Synthetic
  misc_feature (20)..(21): phosphorothioate linkage
uuuguaggagggaggcguctt

SEQ ID NO: 2727 - DNA, 21 bp, Artificial Sequence
  Synthetic
  misc_feature (20)..(21): phosphorothioate linkage
uaacagucccauccuugcgtt

SEQ ID NO: 2728 - DNA, 21 bp, Artificial Sequence
  Synthetic
  misc_feature (20)..(21): phosphorothioate linkage
uguuacacacggacgacgctt

SEQ ID NO: 2729 - DNA, 21 bp, Artificial Sequence
  Synthetic
  misc_feature (20)..(21): phosphorothioate linkage
augaacuugccggucagcgtt

SEQ ID NO: 2730 - DNA, 21 bp, Artificial Sequence
  Synthetic
  misc_feature (20)..(21): phosphorothioate linkage
uuuuguauccagcaccaggtt

SEQ ID NO: 2731 - DNA, 21 bp, Artificial Sequence
  Synthetic
  misc_feature (1)..(2): 2'-deoxy-2'-fluoro
  misc_feature (3)..(3): 2'-O-methyl
  misc_feature (4)..(6): 2'-deoxy-2'-fluoro
  misc_feature (7)..(7): 2'-O-methyl
  misc_feature (8)..(9): 2'-deoxy-2'-fluoro
  misc_feature (10)..(10): 2'-O-methyl
  misc_feature (11)..(13): 2'-deoxy-2'-fluoro
  misc_feature (14)..(14): 2'-O-methyl
  misc_feature (15)..(15): 2'-deoxy-2'-fluoro
  misc_feature (16)..(16): 2'-O-methyl
  misc_feature (17)..(17): 2'-deoxy-2'-fluoro
  misc_feature (18)..(18): 2'-O-methyl
  misc_feature (19)..(19): 2'-deoxy-2'-fluoro
  misc_feature (21)..(21): 3'-3 attached inverted deoxyabasic moiety.
uugccuaccguccgcaugctt

SEQ ID NO: 2732 - DNA, 21 bp, Artificial Sequence
  Synthetic
  misc_feature (1)..(1): 2'-O-methyl
  misc_feature (2)..(5): 2'-deoxy-2'-fluoro
  misc_feature (6)..(6): 2'-O-methyl
  misc_feature (7)..(8): 2'-deoxy-2'-fluoro
  misc_feature (9)..(11): 2'-O-methyl
  misc_feature (12)..(12): 2'-deoxy-2'-fluoro
  misc_feature (13)..(13): 2'-O-methyl
  misc_feature (14)..(14): 2'-deoxy-2'-fluoro
  misc_feature (15)..(15): 2'-O-methyl
  misc_feature (16)..(16): 2'-deoxy-2'-fluoro
  misc_feature (17)..(18): 2'-O-methyl
  misc_feature (19)..(19): 2'-deoxy-2'-fluoro
  misc_feature (21)..(21): 3'-3 attached inverted deoxyabasic moiety.
accuuguugaaugugugactt

SEQ ID NO: 2733 - DNA, 21 bp, Artificial Sequence
  Synthetic
  misc_feature (1)..(2): 2'-O-methyl
  misc_feature (3)..(5): 2'-deoxy-2'-fluoro
  misc_feature (6)..(6): 2'-O-methyl
  misc_feature (7)..(7): 2'-deoxy-2'-fluoro
  misc_feature (8)..(8): 2'-O-methyl
  misc_feature (9)..(10): 2'-deoxy-2'-fluoro
  misc_feature (11)..(12): 2'-O-methyl
  misc_feature (13)..(16): 2'-deoxy-2'-fluoro
  misc_feature (17)..(19): 2'-O-methyl
  misc_feature (21)..(21): 3'-3 attached inverted deoxyabasic moiety.
aguucaugccggcucugggtt

SEQ ID NO: 2734 - DNA, 21 bp, Artificial Sequence
  Synthetic
  misc_feature (1)..(3): 2'-deoxy-2'-fluoro
  misc_feature (4)..(4): 2'-O-methyl
  misc_feature (5)..(5): 2'-deoxy-2'-fluoro
  misc_feature (6)..(15): 2'-O-methyl
  misc_feature (16)..(16): 2'-deoxy-2'-fluoro
  misc_feature (17)..(17): 2'-O-methyl
  misc_feature (18)..(19): 2'-deoxy-2'-fluoro
  misc_feature (21)..(21): 3'-3 attached inverted deoxyabasic moiety.
uuuguaggagggaggcguctt

SEQ ID NO: 2735 - DNA, 21 bp, Artificial Sequence
  Synthetic
  misc_feature (1)..(1): 2'-deoxy-2'-fluoro
  misc_feature (2)..(3): 2'-O-methyl
  misc_feature (4)..(4): 2'-deoxy-2'-fluoro
  misc_feature (5)..(6): 2'-O-methyl
  misc_feature (7)..(10): 2'-deoxy-2'-fluoro
  misc_feature (11)..(11): 2'-O-methyl
  misc_feature (12)..(16): 2'-deoxy-2'-fluoro
  misc_feature (17)..(17): 2'-O-methyl
  misc_feature (18)..(18): 2'-deoxy-2'-fluoro
  misc_feature (19)..(19): 2'-O-methyl
  misc_feature (21)..(21): 3'-3 attached inverted deoxyabasic moiety.
uaacagucccauccuugcgtt

SEQ ID NO: 2736 - DNA, 21 bp, Artificial Sequence
  Synthetic
  misc_feature (1)..(1): 2'-deoxy-2'-fluoro
  misc_feature (2)..(2): 2'-O-methyl
  misc_feature (3)..(4): 2'-deoxy-2'-fluoro
  misc_feature (5)..(5): 2'-O-methyl
  misc_feature (6)..(6): 2'-deoxy-2'-fluoro
  misc_feature (7)..(7): 2'-O-methyl
  misc_feature (8)..(8): 2'-deoxy-2'-fluoro
  misc_feature (9)..(9): 2'-O-methyl
  misc_feature (10)..(10): 2'-deoxy-2'-fluoro
  misc_feature (11)..(13): 2'-O-methyl
  misc_feature (14)..(14): 2'-deoxy-2'-fluoro
  misc_feature (15)..(16): 2'-O-methyl
  misc_feature (17)..(17): 2'-deoxy-2'-fluoro
  misc_feature (18)..(18): 2'-O-methyl
  misc_feature (19)..(19): 2'-deoxy-2'-fluoro
  misc_feature (21)..(21): 3'-3 attached inverted deoxyabasic moiety.
uguuacacacggacgacgctt

SEQ ID NO: 2737 - DNA, 21 bp, Artificial Sequence
  Synthetic
  misc_feature (1)..(1): 2'-O-methyl
  misc_feature (2)..(2): 2'-deoxy-2'-fluoro
  misc_feature (3)..(5): 2'-O-methyl
  misc_feature (6)..(8): 2'-deoxy-2'-fluoro
  misc_feature (9)..(9): 2'-O-methyl
  misc_feature (10)..(11): 2'-deoxy-2'-fluoro
  misc_feature (12)..(13): 2'-O-methyl
  misc_feature (14)..(15): 2'-deoxy-2'-fluoro
  misc_feature (16)..(17): 2'-O-methyl
  misc_feature (18)..(18): 2'-deoxy-2'-fluoro
  misc_feature (19)..(19): 2'-O-methyl
  misc_feature (21)..(21): 3'-3 attached inverted deoxyabasic moiety.
augaacuugccggucagcgtt

SEQ ID NO: 2738 - DNA, 21 bp, Artificial Sequence
  Synthetic
  misc_feature (1)..(4): 2'-deoxy-2'-fluoro
  misc_feature (5)..(5): 2'-O-methyl
  misc_feature (6)..(6): 2'-deoxy-2'-fluoro
  misc_feature (7)..(7): 2'-O-methyl
  misc_feature (8)..(10): 2'-deoxy-2'-fluoro
  misc_feature (11)..(12): 2'-O-methyl
  misc_feature (13)..(13): 2'-deoxy-2'-fluoro
  misc_feature (14)..(14): 2'-O-methyl
  misc_feature (15)..(16): 2'-deoxy-2'-fluoro
  misc_feature (17)..(19): 2'-O-methyl
  misc_feature (21)..(21): 3'-3 attached inverted deoxyabasic moiety.
uuuuguauccagcaccaggtt

SEQ ID NO: 2739 - DNA, 21 bp, Artificial Sequence
  Synthetic
  misc_feature (21)..(21): 3'-3 attached inverted deoxyabasic moiety.
uugccuaccguccgcaugctt

SEQ ID NO: 2740 - DNA, 21 bp, Artificial Sequence
  Synthetic
  misc_feature (21)..(21): 3'-3 attached inverted deoxyabasic moiety.
accuuguugaaugugugactt

SEQ ID NO: 2741 - DNA, 21 bp, Artificial Sequence
  Synthetic
  misc_feature (21)..(21): 3'-3 attached inverted deoxyabasic moiety.
aguucaugccggcucugggtt

SEQ ID NO: 2742 - DNA, 21 bp, Artificial Sequence
  Synthetic
  misc_feature (21)..(21): 3'-3 attached inverted deoxyabasic moiety.
uuuguaggagggaggcguctt

SEQ ID NO: 2743 - DNA, 21 bp, Artificial Sequence
  Synthetic
  misc_feature (21)..(21): 3'-3 attached inverted deoxyabasic moiety.
uaacagucccauccuugcgtt

SEQ ID NO: 2744 - DNA, 21 bp, Artificial Sequence
  Synthetic
  misc_feature (21)..(21): 3'-3 attached inverted deoxyabasic moiety.
uguuacacacggacgacgctt

SEQ ID NO: 2745 - DNA, 21 bp, Artificial Sequence
  Synthetic
  misc_feature (21)..(21): 3'-3 attached inverted deoxyabasic moiety.
augaacuugccggucagcgtt

SEQ ID NO: 2746 - DNA, 21 bp, Artificial Sequence
  Synthetic
  misc_feature (21)..(21): 3'-3 attached inverted deoxyabasic moiety.
uuuuguauccagcaccaggtt

SEQ ID NO: 2747 - DNA, 21 bp, Artificial Sequence
  Synthetic
  misc_feature (4)..(6): 2'-deoxy-2'-fluoro
  misc_feature (7)..(7): 2'-O-methyl
  misc_feature (8)..(9): 2'-deoxy-2'-fluoro
  misc_feature (10)..(10): 2'-O-methyl
  misc_feature (11)..(13): 2'-deoxy-2'-fluoro
  misc_feature (14)..(14): 2'-O-methyl
  misc_feature (15)..(15): 2'-deoxy-2'-fluoro
  misc_feature (16)..(16): 2'-O-methyl
  misc_feature (17)..(17): 2'-deoxy-2'-fluoro
  misc_feature (18)..(18): 2'-O-methyl
  misc_feature (19)..(19): 2'-deoxy-2'-fluoro
  misc_feature (20)..(21): phosphorothioate linkage
uugccuaccguccgcaugctt

SEQ ID NO: 2748 - DNA, 21 bp, Artificial Sequence
  Synthetic
  misc_feature (4)..(5): 2'-deoxy-2'-fluoro
  misc_feature (6)..(6): 2'-O-methyl
  misc_feature (7)..(8): 2'-deoxy-2'-fluoro
  misc_feature (9)..(11): 2'-O-methyl
  misc_feature (12)..(12): 2'-deoxy-2'-fluoro
  misc_feature (13)..(13): 2'-O-methyl
  misc_feature (14)..(14): 2'-deoxy-2'-fluoro
  misc_feature (15)..(15): 2'-O-methyl
  misc_feature (16)..(16): 2'-deoxy-2'-fluoro
  misc_feature (17)..(18): 2'-O-methyl
  misc_feature (19)..(19): 2'-deoxy-2'-fluoro
  misc_feature (20)..(21): phosphorothioate linkage
accuuguugaaugugugactt

SEQ ID NO: 2749 - DNA, 21 bp, Artificial Sequence
  Synthetic
  misc_feature (4)..(5): 2'-deoxy-2'-fluoro
  misc_feature (6)..(6): 2'-O-methyl
  misc_feature (7)..(7): 2'-deoxy-2'-fluoro
  misc_feature (8)..(8): 2'-O-methyl
  misc_feature (9)..(10): 2'-deoxy-2'-fluoro
  misc_feature (11)..(12): 2'-O-methyl
  misc_feature (13)..(16): 2'-deoxy-2'-fluoro
  misc_feature (17)..(19): 2'-O-methyl
  misc_feature (20)..(21): phosphorothioate linkage
aguucaugccggcucugggtt

SEQ ID NO: 2750 - DNA, 21 bp, Artificial Sequence
  Synthetic
  misc_feature (4)..(4): 2'-O-methyl
  misc_feature (5)..(5): 2'-deoxy-2'-fluoro
  misc_feature (6)..(15): 2'-O-methyl
  misc_feature (16)..(16): 2'-deoxy-2'-fluoro
  misc_feature (17)..(17): 2'-O-methyl
  misc_feature (18)..(19): 2'-deoxy-2'-fluoro
  misc_feature (20)..(21): phosphorothioate linkage
uuuguaggagggaggcguctt

SEQ ID NO: 2751 - DNA, 21 bp, Artificial Sequence
  Synthetic
  misc_feature (4)..(4): 2'-deoxy-2'-fluoro
  misc_feature (5)..(6): 2'-O-methyl
  misc_feature (7)..(10): 2'-deoxy-2'-fluoro
  misc_feature (11)..(11): 2'-O-methyl
  misc_feature (12)..(16): 2'-deoxy-2'-fluoro
  misc_feature (17)..(17): 2'-O-methyl
  misc_feature (18)..(18): 2'-deoxy-2'-fluoro
  misc_feature (19)..(19): 2'-O-methyl
  misc_feature (20)..(21): phosphorothioate linkage
uaacagucccauccuugcgtt

SEQ ID NO: 2752 - DNA, 21 bp, Artificial Sequence
  Synthetic
  misc_feature (4)..(4): 2'-deoxy-2'-fluoro
  misc_feature (5)..(5): 2'-O-methyl
  misc_feature (6)..(6): 2'-deoxy-2'-fluoro
  misc_feature (7)..(7): 2'-O-methyl
  misc_feature (8)..(8): 2'-deoxy-2'-fluoro
  misc_feature (9)..(9): 2'-O-methyl
  misc_feature (10)..(10): 2'-deoxy-2'-fluoro
  misc_feature (11)..(13): 2'-O-methyl
  misc_feature (14)..(14): 2'-deoxy-2'-fluoro
  misc_feature (15)..(16): 2'-O-methyl
  misc_feature (17)..(17): 2'-deoxy-2'-fluoro
  misc_feature (18)..(18): 2'-O-methyl
  misc_feature (19)..(19): 2'-deoxy-2'-fluoro
  misc_feature (20)..(21): phosphorothioate linkage
uguuacacacggacgacgctt

SEQ ID NO: 2753 - DNA, 21 bp, Artificial Sequence
  Synthetic
  misc_feature (4)..(5): 2'-O-methyl
  misc_feature (6)..(8): 2'-deoxy-2'-fluoro
  misc_feature (9)..(9): 2'-O-methyl
  misc_feature (10)..(11): 2'-deoxy-2'-fluoro
  misc_feature (12)..(13): 2'-O-methyl
  misc_feature (14)..(15): 2'-deoxy-2'-fluoro
  misc_feature (16)..(17): 2'-O-methyl
  misc_feature (18)..(18): 2'-deoxy-2'-fluoro
  misc_feature (19)..(19): 2'-O-methyl
  misc_feature (20)..(21): phosphorothioate linkage
augaacuugccggucagcgtt

SEQ ID NO: 2754 - DNA, 21 bp, Artificial Sequence
  Synthetic
  misc_feature (4)..(4): 2'-deoxy-2'-fluoro
  misc_feature (5)..(5): 2'-O-methyl
  misc_feature (6)..(6): 2'-deoxy-2'-fluoro
  misc_feature (7)..(7): 2'-O-methyl
  misc_feature (8)..(10): 2'-deoxy-2'-fluoro
  misc_feature (11)..(12): 2'-O-methyl
  misc_feature (13)..(13): 2'-deoxy-2'-fluoro
  misc_feature (14)..(14): 2'-O-methyl
  misc_feature (15)..(16): 2'-deoxy-2'-fluoro
  misc_feature (17)..(19): 2'-O-methyl
  misc_feature (20)..(21): phosphorothioate linkage
uuuuguauccagcaccaggtt

SEQ ID NO: 2755 - RNA, 19 nt, Artificial Sequence
  Synthetic
gcaguccccugaggagcgg

SEQ ID NO: 2756 - RNA, 19 nt, Artificial Sequence
  Synthetic
gggcugguugaaacgcuag

SEQ ID NO: 2757 - RNA, 19 nt, Artificial Sequence
  Synthetic
ggggcgggaucuggcggag

SEQ ID NO: 2758 - RNA, 19 nt, Artificial Sequence
  Synthetic
guggaagaaccgcggcagg

SEQ ID NO: 2759 - RNA, 19 nt, Artificial Sequence
  Synthetic
gggccaagccuccucaacu

SEQ ID NO: 2760 - RNA, 19 nt, Artificial Sequence
  Synthetic
uaugaccucaaccggccag

SEQ ID NO: 2761 - RNA, 19 nt, Artificial Sequence
  Synthetic
ggauuccaccacaaccagg

SEQ ID NO: 2762 - RNA, 19 nt, Artificial Sequence
  Synthetic
gcagcgaagaaguaggcag

SEQ ID NO: 2763 - RNA, 19 nt, Artificial Sequence
  Synthetic
gaacccccagucgcccccu

SEQ ID NO: 2764 - RNA, 19 nt, Artificial Sequence
  Synthetic
ucaggacuccagugucacu

SEQ ID NO: 2765 - RNA, 19 nt, Artificial Sequence
  Synthetic
uucgaagcgaaauauuaaa

SEQ ID NO: 2766 - RNA, 19 nt, Artificial Sequence
  Synthetic
aaagggagccguuccccgc

SEQ ID NO: 2767 - RNA, 19 nt, Artificial Sequence
  Synthetic
cucuauccccaaucuagcg

SEQ ID NO: 2768 - RNA, 19 nt, Artificial Sequence
  Synthetic
ggagguaaagaagaaaggc

SEQ ID NO: 2769 - RNA, 19 nt, Artificial Sequence
  Synthetic
caaaaugaagaagcucggc

SEQ ID NO: 2770 - RNA, 19 nt, Artificial Sequence
  Synthetic
ccaagcaauggaagaagac

SEQ ID NO: 2771 - RNA, 19 nt, Artificial Sequence
  Synthetic
ccuaaucgugggacugcaa

SEQ ID NO: 2772 - RNA, 19 nt, Artificial Sequence
  Synthetic
agggauggaucugaaccuu

SEQ ID NO: 2773 - RNA, 19 nt, Artificial Sequence
  Synthetic
ugaggcugaagcacuggcu

SEQ ID NO: 2774 - RNA, 19 nt, Artificial Sequence
  Synthetic
uggcacuggcuugguguug

SEQ ID NO: 2775 - RNA, 19 nt, Artificial Sequence
  Synthetic
ggaugagcaguuaaaugaa

SEQ ID NO: 2776 - RNA, 19 nt, Artificial Sequence
  Synthetic
auuccauugccucugggau

SEQ ID NO: 2777 - RNA, 19 nt, Artificial Sequence
  Synthetic
ugacagcuucccggaaggc

SEQ ID NO: 2778 - RNA, 19 nt, Artificial Sequence
  Synthetic
cccugagcggcuccaugcc

SEQ ID NO: 2779 - RNA, 19 nt, Artificial Sequence
  Synthetic
caucaaggagcaacugauc

SEQ ID NO: 2780 - RNA, 19 nt, Artificial Sequence
  Synthetic
ccaggagggccuccuagau

SEQ ID NO: 2781 - RNA, 19 nt, Artificial Sequence
  Synthetic
ucgcugcguguccuuucag

SEQ ID NO: 2782 - RNA, 19 nt, Artificial Sequence
  Synthetic
ggcccgguuugcugaaaag

SEQ ID NO: 2783 - RNA, 19 nt, Artificial Sequence
  Synthetic
ggaagagcugauguugguu

SEQ ID NO: 2784 - RNA, 19 nt, Artificial Sequence
  Synthetic
ucacagccuagaauauauu

SEQ ID NO: 2785 - RNA, 19 nt, Artificial Sequence
  Synthetic
ugaucugauggaaacaacc

SEQ ID NO: 2786 - RNA, 19 nt, Artificial Sequence
  Synthetic
ccaguacaugaaugaggga

SEQ ID NO: 2787 - RNA, 19 nt, Artificial Sequence
  Synthetic
agaacuccguguccuagca

SEQ ID NO: 2788 - RNA, 19 nt, Artificial Sequence
  Synthetic
agacaccuacgacucaguu

SEQ ID NO: 2789 - RNA, 19 nt, Artificial Sequence
  Synthetic
uuaucugcauccgaacuca

SEQ ID NO: 2790 - RNA, 19 nt, Artificial Sequence
  Synthetic
auacuccugugccugccug

SEQ ID NO: 2791 - RNA, 19 nt, Artificial Sequence
  Synthetic
ggccucaggcucuguccuc

SEQ ID NO: 2792 - RNA, 19 nt, Artificial Sequence
  Synthetic
caggcugguggaugcgguc

SEQ ID NO: 2793 - RNA, 19 nt, Artificial Sequence
  Synthetic
ccugggggcugagauccgg

SEQ ID NO: 2794 - RNA, 19 nt, Artificial Sequence
  Synthetic
gaauggcauggccaucauu

SEQ ID NO: 2795 - RNA, 19 nt, Artificial Sequence
  Synthetic
uaggccuccuggacaucac

SEQ ID NO: 2796 - RNA, 19 nt, Artificial Sequence
  Synthetic
cgcccagcacagucuuaug

SEQ ID NO: 2797 - RNA, 19 nt, Artificial Sequence
  Synthetic
ggauggcuauugcauguuc

SEQ ID NO: 2798 - RNA, 19 nt, Artificial Sequence
  Synthetic
caaccacguggcuguggca

SEQ ID NO: 2799 - RNA, 19 nt, Artificial Sequence
  Synthetic
agcccgcuaugcucaacag

SEQ ID NO: 2800 - RNA, 19 nt, Artificial Sequence
  Synthetic
gaaacaccgcauccggagg

SEQ ID NO: 2801 - RNA, 19 nt, Artificial Sequence
  Synthetic
gguccuuaucguagauugg

SEQ ID NO: 2802 - RNA, 19 nt, Artificial Sequence
  Synthetic
ggaugugcaccacggucaa

SEQ ID NO: 2803 - RNA, 19 nt, Artificial Sequence
  Synthetic
aggaacacaguucaccuuc

SEQ ID NO: 2804 - RNA, 19 nt, Artificial Sequence
  Synthetic
cgaccaggaccccaguguc

SEQ ID NO: 2805 - RNA, 19 nt, Artificial Sequence
  Synthetic
ccucuauuucuccauccac

SEQ ID NO: 2806 - RNA, 19 nt, Artificial Sequence
  Synthetic
ccgcuacgagcaggguagg

SEQ ID NO: 2807 - RNA, 19 nt, Artificial Sequence
  Synthetic
guucuggccccaccugaag

SEQ ID NO: 2808 - RNA, 19 nt, Artificial Sequence
  Synthetic
ggccucuaacugguccacc

SEQ ID NO: 2809 - RNA, 19 nt, Artificial Sequence
  Synthetic
cacagguuucggccaaggc

SEQ ID NO: 2810 - RNA, 19 nt, Artificial Sequence
  Synthetic
ccaaggauauaccaucaau

SEQ ID NO: 2811 - RNA, 19 nt, Artificial Sequence
  Synthetic
ugugccuuggaaccaggug

SEQ ID NO: 2812 - RNA, 19 nt, Artificial Sequence
  Synthetic
ggggaugcgggaugcugac

SEQ ID NO: 2813 - RNA, 19 nt, Artificial Sequence
  Synthetic
cuacauugcugcuuuccug

SEQ ID NO: 2814 - RNA, 19 nt, Artificial Sequence
  Synthetic
gcacguccugcugccaguc

SEQ ID NO: 2815 - RNA, 19 nt, Artificial Sequence
  Synthetic
cgcccucgaguuccagccu

SEQ ID NO: 2816 - RNA, 19 nt, Artificial Sequence
  Synthetic
ucagcugguccugguggcu

SEQ ID NO: 2817 - RNA, 19 nt, Artificial Sequence
  Synthetic
ugcuggauuugaugcccug

SEQ ID NO: 2818 - RNA, 19 nt, Artificial Sequence
  Synthetic
gcaaggggaccccaagggu

SEQ ID NO: 2819 - RNA, 19 nt, Artificial Sequence
  Synthetic
ugagauggccgccacuccg

SEQ ID NO: 2820 - RNA, 19 nt, Artificial Sequence
  Synthetic
ggcaggguucgcccagcua

SEQ ID NO: 2821 - RNA, 19 nt, Artificial Sequence
  Synthetic
aacccaccugcucaugggu

SEQ ID NO: 2822 - RNA, 19 nt, Artificial Sequence
  Synthetic
ucuggcaggaggcaagcug

SEQ ID NO: 2823 - RNA, 19 nt, Artificial Sequence
  Synthetic
gauccugucucuggagggu

SEQ ID NO: 2824 - RNA, 19 nt, Artificial Sequence
  Synthetic
uggcuacaaccuccgcgcc

SEQ ID NO: 2825 - RNA, 19 nt, Artificial Sequence
  Synthetic
ccuggcugaaggcgucagu

SEQ ID NO: 2826 - RNA, 19 nt, Artificial Sequence
  Synthetic
ugcuucgcuccacacccuu

SEQ ID NO: 2827 - RNA, 19 nt, Artificial Sequence
  Synthetic
ucugggagacccuugcccc

SEQ ID NO: 2828 - RNA, 19 nt, Artificial Sequence
  Synthetic
caugcuggagucaccuggu

SEQ ID NO: 2829 - RNA, 19 nt, Artificial Sequence
  Synthetic
ugcccccugccggagugcc

SEQ ID NO: 2830 - RNA, 19 nt, Artificial Sequence
  Synthetic
ccaggcuucaguuuccugu

SEQ ID NO: 2831 - RNA, 19 nt, Artificial Sequence
  Synthetic
ugcucuggaagcccuugag

SEQ ID NO: 2832 - RNA, 19 nt, Artificial Sequence
  Synthetic
gcccuucugggagguucuu

SEQ ID NO: 2833 - RNA, 19 nt, Artificial Sequence
  Synthetic
ugugagaucaacugagacc

SEQ ID NO: 2834 - RNA, 19 nt, Artificial Sequence
  Synthetic
cguggagagggacaacaug

SEQ ID NO: 2835 - RNA, 19 nt, Artificial Sequence
  Synthetic
ggaggaggacaauguagag

SEQ ID NO: 2836 - RNA, 19 nt, Artificial Sequence
  Synthetic
ggagagcgaggaggaagga

SEQ ID NO: 2837 - RNA, 19 nt, Artificial Sequence
  Synthetic
acccugggagcccccugug

SEQ ID NO: 2838 - RNA, 19 nt, Artificial Sequence
  Synthetic
gcucccaauccugacaugg

SEQ ID NO: 2839 - RNA, 19 nt, Artificial Sequence
  Synthetic
gccagugcuacagucucgc

SEQ ID NO: 2840 - RNA, 19 nt, Artificial Sequence
  Synthetic
cacagggcuggucuaugac

SEQ ID NO: 2841 - RNA, 19 nt, Artificial Sequence
  Synthetic
ccaaaauaugaugaaucac

SEQ ID NO: 2842 - RNA, 19 nt, Artificial Sequence
  Synthetic
cugcaacuugugggacagc

SEQ ID NO: 2843 - RNA, 19 nt, Artificial Sequence
  Synthetic
ccaccacccugagguaccc

SEQ ID NO: 2844 - RNA, 19 nt, Artificial Sequence
  Synthetic
ccagcgcaucuugcggauc

SEQ ID NO: 2845 - RNA, 19 nt, Artificial Sequence
  Synthetic
caugugccgucuggaggag

SEQ ID NO: 2846 - RNA, 19 nt, Artificial Sequence
  Synthetic
gcugggccuugccgggcgc

SEQ ID NO: 2847 - RNA, 19 nt, Artificial Sequence
  Synthetic
cugccucacccugacaccg

SEQ ID NO: 2848 - RNA, 19 nt, Artificial Sequence
  Synthetic
gcgcccugccacagaggcu

SEQ ID NO: 2849 - RNA, 19 nt, Artificial Sequence
  Synthetic
ugagcugcucaccugucac

SEQ ID NO: 2850 - RNA, 19 nt, Artificial Sequence
  Synthetic
cagugcugaguacgugggu

SEQ ID NO: 2851 - RNA, 19 nt, Artificial Sequence
  Synthetic
ucaucuccgggccacagag

SEQ ID NO: 2852 - RNA, 19 nt, Artificial Sequence
  Synthetic
gaaaaugaaaacccgggag

SEQ ID NO: 2853 - RNA, 19 nt, Artificial Sequence
  Synthetic
gcugcaccgugagaguucc

SEQ ID NO: 2854 - RNA, 19 nt, Artificial Sequence
  Synthetic
caacuuugacuccaucuau

SEQ ID NO: 2855 - RNA, 19 nt, Artificial Sequence
  Synthetic
uaucugccccaguaccuuc

SEQ ID NO: 2856 - RNA, 19 nt, Artificial Sequence
  Synthetic
cgccugugcacagcuugcc

SEQ ID NO: 2857 - RNA, 19 nt, Artificial Sequence
  Synthetic
cacuggcgcugccugccgc

SEQ ID NO: 2858 - RNA, 19 nt, Artificial Sequence
  Synthetic
ccugguggaggcugugcuc

SEQ ID NO: 2859 - RNA, 19 nt, Artificial Sequence
  Synthetic
cucaggagagguucugaau

SEQ ID NO: 2860 - RNA, 19 nt, Artificial Sequence
  Synthetic
uggugcugcuguggugcgu

SEQ ID NO: 2861 - RNA, 19 nt, Artificial Sequence
  Synthetic
ucccccaggacaccacgca

SEQ ID NO: 2862 - RNA, 19 nt, Artificial Sequence
  Synthetic
agagcaggaugcagcuugc

SEQ ID NO: 2863 - RNA, 19 nt, Artificial Sequence
  Synthetic
cgguuuuugcuuuuucaac

SEQ ID NO: 2864 - RNA, 19 nt, Artificial Sequence
  Synthetic
cucuguggcuguggcugcu

SEQ ID NO: 2865 - RNA, 19 nt, Artificial Sequence
  Synthetic
ucgccaugcccagacuauc

SEQ ID NO: 2866 - RNA, 19 nt, Artificial Sequence
  Synthetic
cagugggcaugcccuacgg

SEQ ID NO: 2867 - RNA, 19 nt, Artificial Sequence
  Synthetic
gauccugauuguggauugg

SEQ ID NO: 2868 - RNA, 19 nt, Artificial Sequence
  Synthetic
ggauguccaccacgguaau

SEQ ID NO: 2869 - RNA, 19 nt, Artificial Sequence
  Synthetic
uggaacucagcacauguuu

SEQ ID NO: 2870 - RNA, 19 nt, Artificial Sequence
  Synthetic
ugaggaugaccccagugug

SEQ ID NO: 2871 - RNA, 19 nt, Artificial Sequence
  Synthetic
gcuauaugugucccugcac

SEQ ID NO: 2872 - RNA, 19 nt, Artificial Sequence
  Synthetic
ccgcuaugaucauggcacc

SEQ ID NO: 2873 - RNA, 19 nt, Artificial Sequence
  Synthetic
cuucuuccccaugggggau

SEQ ID NO: 2874 - RNA, 19 nt, Artificial Sequence
  Synthetic
ugagggugccagcagccag

SEQ ID NO: 2875 - RNA, 19 nt, Artificial Sequence
  Synthetic
gaucggccgggcugcgggc

SEQ ID NO: 2876 - RNA, 19 nt, Artificial Sequence
  Synthetic
cacaggcuucaccgucaac

SEQ ID NO: 2877 - RNA, 19 nt, Artificial Sequence
  Synthetic
cguggcauggaacgggccc

SEQ ID NO: 2878 - RNA, 19 nt, Artificial Sequence
  Synthetic
ccgcaugggugaugcugac

SEQ ID NO: 2879 - RNA, 19 nt, Artificial Sequence
  Synthetic
cuaccuagcugccuggcau

SEQ ID NO: 2880 - RNA, 19 nt, Artificial Sequence
  Synthetic
ucgccuggugcuucccauu

SEQ ID NO: 2881 - RNA, 19 nt, Artificial Sequence
  Synthetic
ugccuacgaguuuaaccca

SEQ ID NO: 2882 - RNA, 19 nt, Artificial Sequence
  Synthetic
agaacuggugcuggucuca

SEQ ID NO: 2883 - RNA, 19 nt, Artificial Sequence
  Synthetic
agcuggcuuugaugcugca

SEQ ID NO: 2884 - RNA, 19 nt, Artificial Sequence
  Synthetic
acggggggauccgcugggg

SEQ ID NO: 2885 - RNA, 19 nt, Artificial Sequence
  Synthetic
gggcugccaggugucaccu

SEQ ID NO: 2886 - RNA, 19 nt, Artificial Sequence
  Synthetic
ugaggguuaugcccaccuc

SEQ ID NO: 2887 - RNA, 19 nt, Artificial Sequence
  Synthetic
cacccaccugcugaugggc

SEQ ID NO: 2888 - RNA, 19 nt, Artificial Sequence
  Synthetic
ccuugccaguggccgcauu

SEQ ID NO: 2889 - RNA, 19 nt, Artificial Sequence
  Synthetic
uauccuuauccuagagggu

SEQ ID NO: 2890 - RNA, 19 nt, Artificial Sequence
  Synthetic
uggcuauaaccugacaucc

SEQ ID NO: 2891 - RNA, 19 nt, Artificial Sequence
  Synthetic
caucucagaguccauggcu

SEQ ID NO: 2892 - RNA, 19 nt, Artificial Sequence
  Synthetic
ugccugcacucgcucccuc

SEQ ID NO: 2893 - RNA, 19 nt, Artificial Sequence
  Synthetic
ccuuggagacccaccaccc

SEQ ID NO: 2894 - RNA, 19 nt, Artificial Sequence
  Synthetic
ccugcugacccugccacgg

SEQ ID NO: 2895 - RNA, 19 nt, Artificial Sequence
  Synthetic
gcccccacuaucaggggcc

SEQ ID NO: 2896 - RNA, 19 nt, Artificial Sequence
  Synthetic
ccuggccucaaucacugag

SEQ ID NO: 2897 - RNA, 19 nt, Artificial Sequence
  Synthetic
gaccauccaaguccaucgc

SEQ ID NO: 2898 - RNA, 19 nt, Artificial Sequence
  Synthetic
cagauacuggcgcagcuua

SEQ ID NO: 2899 - RNA, 19 nt, Artificial Sequence
  Synthetic
acgggucaugaagguagaa

SEQ ID NO: 2900 - RNA, 19 nt, Artificial Sequence
  Synthetic
agacagagaaggacccucc

SEQ ID NO: 2901 - RNA, 19 nt, Artificial Sequence
  Synthetic
caguucuaaguuggucacc

SEQ ID NO: 2902 - RNA, 19 nt, Artificial Sequence
  Synthetic
caagaaggcaccccaacca

SEQ ID NO: 2903 - RNA, 19 nt, Artificial Sequence
  Synthetic
agccaaaccuagguuagcu

SEQ ID NO: 2904 - RNA, 19 nt, Artificial Sequence
  Synthetic
ugagcggaugaccacacga

SEQ ID NO: 2905 - RNA, 19 nt, Artificial Sequence
  Synthetic
agaaaagaagguucuggaa

SEQ ID NO: 2906 - RNA, 19 nt, Artificial Sequence
  Synthetic
agcaggcauggggaaaguc

SEQ ID NO: 2907 - RNA, 19 nt, Artificial Sequence
  Synthetic
caccucggcaucauuuggg

SEQ ID NO: 2908 - RNA, 19 nt, Artificial Sequence
  Synthetic
ggaagaguccacuccaggc

SEQ ID NO: 2909 - RNA, 19 nt, Artificial Sequence
  Synthetic
ccagacuaacucagagaca

SEQ ID NO: 2910 - RNA, 19 nt, Artificial Sequence
  Synthetic
agcugugguggcccucacu

SEQ ID NO: 2911 - RNA, 19 nt, Artificial Sequence
  Synthetic
ucaggaccagcccucagag

SEQ ID NO: 2912 - RNA, 19 nt, Artificial Sequence
  Synthetic
ggcagccacagggggagcc

SEQ ID NO: 2913 - RNA, 19 nt, Artificial Sequence
  Synthetic
cacucuggcccagaccauu

SEQ ID NO: 2914 - RNA, 19 nt, Artificial Sequence
  Synthetic
uucugaggcagccauuggg

SEQ ID NO: 2915 - RNA, 19 nt, Artificial Sequence
  Synthetic
gggagccaugcugggccag

SEQ ID NO: 2916 - RNA, 19 nt, Artificial Sequence
  Synthetic
gaccaccucagaggaggcu

SEQ ID NO: 2917 - RNA, 19 nt, Artificial Sequence
  Synthetic
ugucgggggagccacuccg

SEQ ID NO: 2918 - RNA, 19 nt, Artificial Sequence
  Synthetic
ggaccagaccaccucagag

SEQ ID NO: 2919 - RNA, 19 nt, Artificial Sequence
  Synthetic
ggagacugugggaggagcc

SEQ ID NO: 2920 - RNA, 19 nt, Artificial Sequence
  Synthetic
cauucuggaccagaccacc

SEQ ID NO: 2921 - RNA, 19 nt, Artificial Sequence
  Synthetic
cucagaggaugcuguuggg

SEQ ID NO: 2922 - RNA, 19 nt, Artificial Sequence
  Synthetic
gggagccacgcugggccag

SEQ ID NO: 2923 - RNA, 19 nt, Artificial Sequence
  Synthetic
gacuaccucagaggaggcu

SEQ ID NO: 2924 - RNA, 19 nt, Artificial Sequence
  Synthetic
uguaggaggagcuacacug

SEQ ID NO: 2925 - RNA, 19 nt, Artificial Sequence
  Synthetic
ggcccagaccaccucggag

SEQ ID NO: 2926 - RNA, 19 nt, Artificial Sequence
  Synthetic
ggcagccauggagggagcc

SEQ ID NO: 2927 - RNA, 19 nt, Artificial Sequence
  Synthetic
cacacuggaccagacuacg

SEQ ID NO: 2928 - RNA, 19 nt, Artificial Sequence
  Synthetic
gucagaggaggcuccaggg

SEQ ID NO: 2929 - RNA, 19 nt, Artificial Sequence
  Synthetic
gggcaccgagcugauccaa

SEQ ID NO: 2930 - RNA, 19 nt, Artificial Sequence
  Synthetic
aacuccucuagccucgagc

SEQ ID NO: 2931 - RNA, 19 nt, Artificial Sequence
  Synthetic
cacagaccaccagaccccc

SEQ ID NO: 2932 - RNA, 19 nt, Artificial Sequence
  Synthetic
cccaaccucaccugugcag

SEQ ID NO: 2933 - RNA, 19 nt, Artificial Sequence
  Synthetic
gggaacuacaccccagaua

SEQ ID NO: 2934 - RNA, 19 nt, Artificial Sequence
  Synthetic
aucucccaguacacugauu

SEQ ID NO: 2935 - RNA, 19 nt, Artificial Sequence
  Synthetic
ugggagucucaggaccuug

SEQ ID NO: 2936 - RNA, 19 nt, Artificial Sequence
  Synthetic
ggagcuaggcagcgaaucu

SEQ ID NO: 2937 - RNA, 19 nt, Artificial Sequence
  Synthetic
ucagggggccucagaaucu

SEQ ID NO: 2938 - RNA, 19 nt, Artificial Sequence
  Synthetic
ucaggccccaggagaggag

SEQ ID NO: 2939 - RNA, 19 nt, Artificial Sequence
  Synthetic
gaaccuacuaggagaggca

SEQ ID NO: 2940 - RNA, 19 nt, Artificial Sequence
  Synthetic
agcuggaggucaggacaug

SEQ ID NO: 2941 - RNA, 19 nt, Artificial Sequence
  Synthetic
ggcugauucgaugcugaug

SEQ ID NO: 2942 - RNA, 19 nt, Artificial Sequence
  Synthetic
gcagggaucuaggggccuc

SEQ ID NO: 2943 - RNA, 19 nt, Artificial Sequence
  Synthetic
cacugaucaggccauauuu

SEQ ID NO: 2944 - RNA, 19 nt, Artificial Sequence
  Synthetic
uuaugcugugacaccacug

SEQ ID NO: 2945 - RNA, 19 nt, Artificial Sequence
  Synthetic
gcccugguguccccauuug

SEQ ID NO: 2946 - RNA, 19 nt, Artificial Sequence
  Synthetic
gguggcaguaugccccaua

SEQ ID NO: 2947 - RNA, 19 nt, Artificial Sequence
  Synthetic
accugcagcaggccuagac

SEQ ID NO: 2948 - RNA, 19 nt, Artificial Sequence
  Synthetic
cgugacccaaccuuguggg

SEQ ID NO: 2949 - RNA, 19 nt, Artificial Sequence
  Synthetic
ggacuguggaacaauccaa

SEQ ID NO: 2950 - RNA, 19 nt, Artificial Sequence
  Synthetic
agagaauugggugugucuc

SEQ ID NO: 2951 - RNA, 19 nt, Artificial Sequence
  Synthetic
cucuugcuaucaggucuac

SEQ ID NO: 2952 - RNA, 19 nt, Artificial Sequence
  Synthetic
cuguggucguuacaucaau

SEQ ID NO: 2953 - RNA, 19 nt, Artificial Sequence
  Synthetic
uggccacaugcuccaacac

SEQ ID NO: 2954 - RNA, 19 nt, Artificial Sequence
  Synthetic
ccauggaaauucuggacac

SEQ ID NO: 2955 - RNA, 19 nt, Artificial Sequence
  Synthetic
cccgcugguccucagcuac

SEQ ID NO: 2956 - RNA, 19 nt, Artificial Sequence
  Synthetic
caucgaccugucagccugg

SEQ ID NO: 2957 - RNA, 19 nt, Artificial Sequence
  Synthetic
guguuacuacugucaggcc

SEQ ID NO: 2958 - RNA, 19 nt, Artificial Sequence
  Synthetic
cuauguccaccaccaggcu

SEQ ID NO: 2959 - RNA, 19 nt, Artificial Sequence
  Synthetic
ucuccuagaugugaagaac

SEQ ID NO: 2960 - RNA, 19 nt, Artificial Sequence
  Synthetic
caucgcccaccagaacaag

SEQ ID NO: 2961 - RNA, 19 nt, Artificial Sequence
  Synthetic
guuuggggaggauaugccc

SEQ ID NO: 2962 - RNA, 19 nt, Artificial Sequence
  Synthetic
ccacccacacuaagcccca

SEQ ID NO: 2963 - RNA, 19 nt, Artificial Sequence
  Synthetic
agaauacggucccucuuca

SEQ ID NO: 2964 - RNA, 19 nt, Artificial Sequence
  Synthetic
accuucugaggcccacgau

SEQ ID NO: 2965 - RNA, 19 nt, Artificial Sequence
  Synthetic
uagaccagcuguagcucau

SEQ ID NO: 2966 - RNA, 19 nt, Artificial Sequence
  Synthetic
uuccagccuguaccuugga

SEQ ID NO: 2967 - RNA, 19 nt, Artificial Sequence
  Synthetic
augagggguagccucccac

SEQ ID NO: 2968 - RNA, 19 nt, Artificial Sequence
  Synthetic
cugcaucccauccugaaua

SEQ ID NO: 2969 - RNA, 19 nt, Artificial Sequence
  Synthetic
auccuuugcaacuccccaa

SEQ ID NO: 2970 - RNA, 19 nt, Artificial Sequence
  Synthetic
agagugcuuauuuaagugu

SEQ ID NO: 2971 - RNA, 19 nt, Artificial Sequence
  Synthetic
uuaauacuuuuaagagaac

SEQ ID NO: 2972 - RNA, 19 nt, Artificial Sequence
  Synthetic
cugcgacgauuaauugugg

SEQ ID NO: 2973 - RNA, 19 nt, Artificial Sequence
  Synthetic
gaucucccccugcccauug

SEQ ID NO: 2974 - RNA, 19 nt, Artificial Sequence
  Synthetic
gccugcuugaggggcacca

SEQ ID NO: 2975 - RNA, 19 nt, Artificial Sequence
  Synthetic
acuacuccagcccagaagg

SEQ ID NO: 2976 - RNA, 19 nt, Artificial Sequence
  Synthetic
gaaaggggggcagcucagu

SEQ ID NO: 2977 - RNA, 19 nt, Artificial Sequence
  Synthetic
uggccccaagagggagcug

SEQ ID NO: 2978 - RNA, 19 nt, Artificial Sequence
  Synthetic
gauaucaugaggauaacau

SEQ ID NO: 2979 - RNA, 19 nt, Artificial Sequence
  Synthetic
uuggcgggaggggaguuaa

SEQ ID NO: 2980 - RNA, 19 nt, Artificial Sequence
  Synthetic
acuggcaggcauggcaagg

SEQ ID NO: 2981 - RNA, 19 nt, Artificial Sequence
  Synthetic
guugcauauguaauaaagu

SEQ ID NO: 2982 - RNA, 19 nt, Artificial Sequence
  Synthetic
ccgcuccucaggggacugc

SEQ ID NO: 2983 - RNA, 19 nt, Artificial Sequence
  Synthetic
cuagcguuucaaccagccc

SEQ ID NO: 2984 - RNA, 19 nt, Artificial Sequence
  Synthetic
cuccgccagaucccgcccc

SEQ ID NO: 2985 - RNA, 19 nt, Artificial Sequence
  Synthetic
ccugccgcgguucuuccac

SEQ ID NO: 2986 - RNA, 19 nt, Artificial Sequence
  Synthetic
aguugaggaggcuuggccc

SEQ ID NO: 2987 - RNA, 19 nt, Artificial Sequence
  Synthetic
cuggccgguugaggucaua

SEQ ID NO: 2988 - RNA, 19 nt, Artificial Sequence
  Synthetic
ccugguugugguggaaucc

SEQ ID NO: 2989 - RNA, 19 nt, Artificial Sequence
  Synthetic
cugccuacuucuucgcugc

SEQ ID NO: 2990 - RNA, 19 nt, Artificial Sequence
  Synthetic
agggggcgacuggggguuc

SEQ ID NO: 2991 - RNA, 19 nt, Artificial Sequence
  Synthetic
agugacacuggaguccuga

SEQ ID NO: 2992 - RNA, 19 nt, Artificial Sequence
  Synthetic
uuuaauauuucgcuucgaa

SEQ ID NO: 2993 - RNA, 19 nt, Artificial Sequence
  Synthetic
gcggggaacggcucccuuu

SEQ ID NO: 2994 - RNA, 19 nt, Artificial Sequence
  Synthetic
cgcuagauuggggauagag

SEQ ID NO: 2995 - RNA, 19 nt, Artificial Sequence
  Synthetic
gccuuucuucuuuaccucc

SEQ ID NO: 2996 - RNA, 19 nt, Artificial Sequence
  Synthetic
gccgagcuucuucauuuug

SEQ ID NO: 2997 - RNA, 19 nt, Artificial Sequence
  Synthetic
gucuucuuccauugcuugg

SEQ ID NO: 2998 - RNA, 19 nt, Artificial Sequence
  Synthetic
uugcagucccacgauuagg

SEQ ID NO: 2999 - RNA, 19 nt, Artificial Sequence
  Synthetic
aagguucagauccaucccu

SEQ ID NO: 3000 - RNA, 19 nt, Artificial Sequence
  Synthetic
agccagugcuucagccuca

SEQ ID NO: 3001 - RNA, 19 nt, Artificial Sequence
  Synthetic
caacaccaagccagugcca

SEQ ID NO: 3002 - RNA, 19 nt, Artificial Sequence
  Synthetic
uucauuuaacugcucaucc

SEQ ID NO: 3003 - RNA, 19 nt, Artificial Sequence
  Synthetic
aucccagaggcaauggaau

SEQ ID NO: 3004 - RNA, 19 nt, Artificial Sequence
  Synthetic
gccuuccgggaagcuguca

SEQ ID NO: 3005 - RNA, 19 nt, Artificial Sequence
  Synthetic
ggcauggagccgcucaggg

SEQ ID NO: 3006 - RNA, 19 nt, Artificial Sequence
  Synthetic
gaucaguugcuccuugaug

SEQ ID NO: 3007 - RNA, 19 nt, Artificial Sequence
  Synthetic
aucuaggaggcccuccugg

SEQ ID NO: 3008 - RNA, 19 nt, Artificial Sequence
  Synthetic
cugaaaggacacgcagcga

SEQ ID NO: 3009 - RNA, 19 nt, Artificial Sequence
  Synthetic
cuuuucagcaaaccgggcc

SEQ ID NO: 3010 - RNA, 19 nt, Artificial Sequence
  Synthetic
aaccaacaucagcucuucc

SEQ ID NO: 3011 - RNA, 19 nt, Artificial Sequence
  Synthetic
aauauauucuaggcuguga

SEQ ID NO: 3012 - RNA, 19 nt, Artificial Sequence
  Synthetic
gguuguuuccaucagauca

SEQ ID NO: 3013 - RNA, 19 nt, Artificial Sequence
  Synthetic
ucccucauucauguacugg

SEQ ID NO: 3014 - RNA, 19 nt, Artificial Sequence
  Synthetic
ugcuaggacacggaguucu

SEQ ID NO: 3015 - RNA, 19 nt, Artificial Sequence
  Synthetic
aacugagucguaggugucu

SEQ ID NO: 3016 - RNA, 19 nt, Artificial Sequence
  Synthetic
ugaguucggaugcagauaa

SEQ ID NO: 3017 - RNA, 19 nt, Artificial Sequence
  Synthetic
caggcaggcacaggaguau

SEQ ID NO: 3018 - RNA, 19 nt, Artificial Sequence
  Synthetic
gaggacagagccugaggcc

SEQ ID NO: 3019 - RNA, 19 nt, Artificial Sequence
  Synthetic
gaccgcauccaccagccug

SEQ ID NO: 3020 - RNA, 19 nt, Artificial Sequence
  Synthetic
ccggaucucagcccccagg

SEQ ID NO: 3021 - RNA, 19 nt, Artificial Sequence
  Synthetic
aaugauggccaugccauuc

SEQ ID NO: 3022 - RNA, 19 nt, Artificial Sequence
  Synthetic
gugauguccaggaggccua

SEQ ID NO: 3023 - RNA, 19 nt, Artificial Sequence
  Synthetic
cauaagacugugcugggcg

SEQ ID NO: 3024 - RNA, 19 nt, Artificial Sequence
  Synthetic
gaacaugcaauagccaucc

SEQ ID NO: 3025 - RNA, 19 nt, Artificial Sequence
  Synthetic
ugccacagccacgugguug

SEQ ID NO: 3026 - RNA, 19 nt, Artificial Sequence
  Synthetic
cuguugagcauagcgggcu

SEQ ID NO: 3027 - RNA, 19 nt, Artificial Sequence
  Synthetic
ccuccggaugcgguguuuc

SEQ ID NO: 3028 - RNA, 19 nt, Artificial Sequence
  Synthetic
ccaaucuacgauaaggacc

SEQ ID NO: 3029 - RNA, 19 nt, Artificial Sequence
  Synthetic
uugaccguggugcacaucc

SEQ ID NO: 3030 - RNA, 19 nt, Artificial Sequence
  Synthetic
gaaggugaacuguguuccu

SEQ ID NO: 3031 - RNA, 19 nt, Artificial Sequence
  Synthetic
gacacugggguccuggucg

SEQ ID NO: 3032 - RNA, 19 nt, Artificial Sequence
  Synthetic
guggauggagaaauagagg

SEQ ID NO: 3033 - RNA, 19 nt, Artificial Sequence
  Synthetic
ccuacccugcucguagcgg

SEQ ID NO: 3034 - RNA, 19 nt, Artificial Sequence
  Synthetic
cuucagguggggccagaac

SEQ ID NO: 3035 - RNA, 19 nt, Artificial Sequence
  Synthetic
gguggaccaguuagaggcc

SEQ ID NO: 3036 - RNA, 19 nt, Artificial Sequence
  Synthetic
gccuuggccgaaaccugug

SEQ ID NO: 3037 - RNA, 19 nt, Artificial Sequence
  Synthetic
auugaugguauauccuugg

SEQ ID NO: 3038 - RNA, 19 nt, Artificial Sequence
  Synthetic
caccugguuccaaggcaca

SEQ ID NO: 3039 - RNA, 19 nt, Artificial Sequence
  Synthetic
gucagcaucccgcaucccc

SEQ ID NO: 3040 - RNA, 19 nt, Artificial Sequence
  Synthetic
caggaaagcagcaauguag

SEQ ID NO: 3041 - RNA, 19 nt, Artificial Sequence
  Synthetic
gacuggcagcaggacgugc

SEQ ID NO: 3042 - RNA, 19 nt, Artificial Sequence
  Synthetic
aggcuggaacucgagggcg

SEQ ID NO: 3043 - RNA, 19 nt, Artificial Sequence
  Synthetic
agccaccaggaccagcuga

SEQ ID NO: 3044 - RNA, 19 nt, Artificial Sequence
  Synthetic
cagggcaucaaauccagca

SEQ ID NO: 3045 - RNA, 19 nt, Artificial Sequence
  Synthetic
acccuugggguccccuugc

SEQ ID NO: 3046 - RNA, 19 nt, Artificial Sequence
  Synthetic
cggaguggcggccaucuca

SEQ ID NO: 3047 - RNA, 19 nt, Artificial Sequence
  Synthetic
uagcugggcgaacccugcc

SEQ ID NO: 3048 - RNA, 19 nt, Artificial Sequence
  Synthetic
acccaugagcagguggguu

SEQ ID NO: 3049 - RNA, 19 nt, Artificial Sequence
  Synthetic
cagcuugccuccugccaga

SEQ ID NO: 3050 - RNA, 19 nt, Artificial Sequence
  Synthetic
acccuccagagacaggauc

SEQ ID NO: 3051 - RNA, 19 nt, Artificial Sequence
  Synthetic
ggcgcggagguuguagcca

SEQ ID NO: 3052 - RNA, 19 nt, Artificial Sequence
  Synthetic
acugacgccuucagccagg

SEQ ID NO: 3053 - RNA, 19 nt, Artificial Sequence
  Synthetic
aaggguguggagcgaagca

SEQ ID NO: 3054 - RNA, 19 nt, Artificial Sequence
  Synthetic
ggggcaagggucucccaga

SEQ ID NO: 3055 - RNA, 19 nt, Artificial Sequence
  Synthetic
accaggugacuccagcaug

SEQ ID NO: 3056 - RNA, 19 nt, Artificial Sequence
  Synthetic
ggcacuccggcagggggca

SEQ ID NO: 3057 - RNA, 19 nt, Artificial Sequence
  Synthetic
acaggaaacugaagccugg

SEQ ID NO: 3058 - RNA, 19 nt, Artificial Sequence
  Synthetic
cucaagggcuuccagagca

SEQ ID NO: 3059 - RNA, 19 nt, Artificial Sequence
  Synthetic
aagaaccucccagaagggc

SEQ ID NO: 3060 - RNA, 19 nt, Artificial Sequence
  Synthetic
ggucucaguugaucucaca

SEQ ID NO: 3061 - RNA, 19 nt, Artificial Sequence
  Synthetic
cauguugucccucuccacg

SEQ ID NO: 3062 - RNA, 19 nt, Artificial Sequence
  Synthetic
cucuacauuguccuccucc

SEQ ID NO: 3063 - RNA, 19 nt, Artificial Sequence
  Synthetic
uccuuccuccucgcucucc

SEQ ID NO: 3064 - RNA, 19 nt, Artificial Sequence
  Synthetic
cacagggggcucccagggu

SEQ ID NO: 3065 - RNA, 19 nt, Artificial Sequence
  Synthetic
ccaugucaggauugggagc

SEQ ID NO: 3066 - RNA, 19 nt, Artificial Sequence
  Synthetic
gcgagacuguagcacuggc

SEQ ID NO: 3067 - RNA, 19 nt, Artificial Sequence
  Synthetic
gucauagaccagcccugug

SEQ ID NO: 3068 - RNA, 19 nt, Artificial Sequence
  Synthetic
gugauucaucauauuuugg

SEQ ID NO: 3069 - RNA, 19 nt, Artificial Sequence
  Synthetic
gcugucccacaaguugcag

SEQ ID NO: 3070 - RNA, 19 nt, Artificial Sequence
  Synthetic
ggguaccucaggguggugg

SEQ ID NO: 3071 - RNA, 19 nt, Artificial Sequence
  Synthetic
gauccgcaagaugcgcugg

SEQ ID NO: 3072 - RNA, 19 nt, Artificial Sequence
  Synthetic
cuccuccagacggcacaug

SEQ ID NO: 3073 - RNA, 19 nt, Artificial Sequence
  Synthetic
gcgcccggcaaggcccagc

SEQ ID NO: 3074 - RNA, 19 nt, Artificial Sequence
  Synthetic
cggugucagggugaggcag

SEQ ID NO: 3075 - RNA, 19 nt, Artificial Sequence
  Synthetic
agccucuguggcagggcgc

SEQ ID NO: 3076 - RNA, 19 nt, Artificial Sequence
  Synthetic
gugacaggugagcagcuca

SEQ ID NO: 3077 - RNA, 19 nt, Artificial Sequence
  Synthetic
acccacguacucagcacug

SEQ ID NO: 3078 - RNA, 19 nt, Artificial Sequence
  Synthetic
cucuguggcccggagauga

SEQ ID NO: 3079 - RNA, 19 nt, Artificial Sequence
  Synthetic
cucccggguuuucauuuuc

SEQ ID NO: 3080 - RNA, 19 nt, Artificial Sequence
  Synthetic
ggaacucucacggugcagc

SEQ ID NO: 3081 - RNA, 19 nt, Artificial Sequence
  Synthetic
auagauggagucaaaguug

SEQ ID NO: 3082 - RNA, 19 nt, Artificial Sequence
  Synthetic
gaagguacuggggcagaua

SEQ ID NO: 3083 - RNA, 19 nt, Artificial Sequence
  Synthetic
ggcaagcugugcacaggcg

SEQ ID NO: 3084 - RNA, 19 nt, Artificial Sequence
  Synthetic
gcggcaggcagcgccagug

SEQ ID NO: 3085 - RNA, 19 nt, Artificial Sequence
  Synthetic
gagcacagccuccaccagg

SEQ ID NO: 3086 - RNA, 19 nt, Artificial Sequence
  Synthetic
auucagaaccucuccugag

SEQ ID NO: 3087 - RNA, 19 nt, Artificial Sequence
  Synthetic
acgcaccacagcagcacca

SEQ ID NO: 3088 - RNA, 19 nt, Artificial Sequence
  Synthetic
ugcgugguguccuggggga

SEQ ID NO: 3089 - RNA, 19 nt, Artificial Sequence
  Synthetic
gcaagcugcauccugcucu

SEQ ID NO: 3090 - RNA, 19 nt, Artificial Sequence
  Synthetic
guugaaaaagcaaaaaccg

SEQ ID NO: 3091 - RNA, 19 nt, Artificial Sequence
  Synthetic
agcagccacagccacagag

SEQ ID NO: 3092 - RNA, 19 nt, Artificial Sequence
  Synthetic
gauagucugggcauggcga

SEQ ID NO: 3093 - RNA, 19 nt, Artificial Sequence
  Synthetic
ccguagggcaugcccacug

SEQ ID NO: 3094 - RNA, 19 nt, Artificial Sequence
  Synthetic
ccaauccacaaucaggauc

SEQ ID NO: 3095 - RNA, 19 nt, Artificial Sequence
  Synthetic
auuaccgugguggacaucc

SEQ ID NO: 3096 - RNA, 19 nt, Artificial Sequence
  Synthetic
aaacaugugcugaguucca

SEQ ID NO: 3097 - RNA, 19 nt, Artificial Sequence
  Synthetic
cacacuggggucauccuca

SEQ ID NO: 3098 - RNA, 19 nt, Artificial Sequence
  Synthetic
gugcagggacacauauagc

SEQ ID NO: 3099 - RNA, 19 nt, Artificial Sequence
  Synthetic
ggugccaugaucauagcgg

SEQ ID NO: 3100 - RNA, 19 nt, Artificial Sequence
  Synthetic
aucccccauggggaagaag

SEQ ID NO: 3101 - RNA, 19 nt, Artificial Sequence
  Synthetic
cuggcugcuggcacccuca

SEQ ID NO: 3102 - RNA, 19 nt, Artificial Sequence
  Synthetic
gcccgcagcccggccgauc

SEQ ID NO: 3103 - RNA, 19 nt, Artificial Sequence
  Synthetic
guugacggugaagccugug

SEQ ID NO: 3104 - RNA, 19 nt, Artificial Sequence
  Synthetic
gggcccguuccaugccacg

SEQ ID NO: 3105 - RNA, 19 nt, Artificial Sequence
  Synthetic
gucagcaucacccaugcgg

SEQ ID NO: 3106 - RNA, 19 nt, Artificial Sequence
  Synthetic
augccaggcagcuagguag

SEQ ID NO: 3107 - RNA, 19 nt, Artificial Sequence
  Synthetic
aaugggaagcaccaggcga

SEQ ID NO: 3108 - RNA, 19 nt, Artificial Sequence
  Synthetic
uggguuaaacucguaggca

SEQ ID NO: 3109 - RNA, 19 nt, Artificial Sequence
  Synthetic
ugagaccagcaccaguucu

SEQ ID NO: 3110 - RNA, 19 nt, Artificial Sequence
  Synthetic
ugcagcaucaaagccagcu

SEQ ID NO: 3111 - RNA, 19 nt, Artificial Sequence
  Synthetic
ccccagcggauccccccgu

SEQ ID NO: 3112 - RNA, 19 nt, Artificial Sequence
  Synthetic
aggugacaccuggcagccc

SEQ ID NO: 3113 - RNA, 19 nt, Artificial Sequence
  Synthetic
gaggugggcauaacccuca

SEQ ID NO: 3114 - RNA, 19 nt, Artificial Sequence
  Synthetic
gcccaucagcaggugggug

SEQ ID NO: 3115 - RNA, 19 nt, Artificial Sequence
  Synthetic
aaugcggccacuggcaagg

SEQ ID NO: 3116 - RNA, 19 nt, Artificial Sequence
  Synthetic
acccucuaggauaaggaua

SEQ ID NO: 3117 - RNA, 19 nt, Artificial Sequence
  Synthetic
ggaugucagguuauagcca

SEQ ID NO: 3118 - RNA, 19 nt, Artificial Sequence
  Synthetic
agccauggacucugagaug

SEQ ID NO: 3119 - RNA, 19 nt, Artificial Sequence
  Synthetic
gagggagcgagugcaggca

SEQ ID NO: 3120 - RNA, 19 nt, Artificial Sequence
  Synthetic
ggguggugggucuccaagg

SEQ ID NO: 3121 - RNA, 19 nt, Artificial Sequence
  Synthetic
ccguggcagggucagcagg

SEQ ID NO: 3122 - RNA, 19 nt, Artificial Sequence
  Synthetic
ggccccugauagugggggc

SEQ ID NO: 3123 - RNA, 19 nt, Artificial Sequence
  Synthetic
cucagugauugaggccagg

SEQ ID NO: 3124 - RNA, 19 nt, Artificial Sequence
  Synthetic
gcgauggacuuggaugguc

SEQ ID NO: 3125 - RNA, 19 nt, Artificial Sequence
  Synthetic
uaagcugcgccaguaucug

SEQ ID NO: 3126 - RNA, 19 nt, Artificial Sequence
  Synthetic
uucuaccuucaugacccgu

SEQ ID NO: 3127 - RNA, 19 nt, Artificial Sequence
  Synthetic
ggaggguccuucucugucu

SEQ ID NO: 3128 - RNA, 19 nt, Artificial Sequence
  Synthetic
ggugaccaacuuagaacug

SEQ ID NO: 3129 - RNA, 19 nt, Artificial Sequence
  Synthetic
ugguuggggugccuucuug

SEQ ID NO: 3130 - RNA, 19 nt, Artificial Sequence
  Synthetic
agcuaaccuagguuuggcu

SEQ ID NO: 3131 - RNA, 19 nt, Artificial Sequence
  Synthetic
ucguguggucauccgcuca

SEQ ID NO: 3132 - RNA, 19 nt, Artificial Sequence
  Synthetic
uuccagaaccuucuuuucu

SEQ ID NO: 3133 - RNA, 19 nt, Artificial Sequence
  Synthetic
gacuuuccccaugccugcu

SEQ ID NO: 3134 - RNA, 19 nt, Artificial Sequence
  Synthetic
cccaaaugaugccgaggug

SEQ ID NO: 3135 - RNA, 19 nt, Artificial Sequence
  Synthetic
gccuggaguggacucuucc

SEQ ID NO: 3136 - RNA, 19 nt, Artificial Sequence
  Synthetic
ugucucugaguuagucugg

SEQ ID NO: 3137 - RNA, 19 nt, Artificial Sequence
  Synthetic
agugagggccaccacagcu

SEQ ID NO: 3138 - RNA, 19 nt, Artificial Sequence
  Synthetic
cucugagggcugguccuga

SEQ ID NO: 3139 - RNA, 19 nt, Artificial Sequence
  Synthetic
ggcucccccuguggcugcc

SEQ ID NO: 3140 - RNA, 19 nt, Artificial Sequence
  Synthetic
aauggucugggccagagug

SEQ ID NO: 3141 - RNA, 19 nt, Artificial Sequence
  Synthetic
cccaauggcugccucagaa

SEQ ID NO: 3142 - RNA, 19 nt, Artificial Sequence
  Synthetic
cuggcccagcauggcuccc

SEQ ID NO: 3143 - RNA, 19 nt, Artificial Sequence
  Synthetic
agccuccucugaggugguc

SEQ ID NO: 3144 - RNA, 19 nt, Artificial Sequence
  Synthetic
cggaguggcucccccgaca

SEQ ID NO: 3145 - RNA, 19 nt, Artificial Sequence
  Synthetic
cucugagguggucuggucc

SEQ ID NO: 3146 - RNA, 19 nt, Artificial Sequence
  Synthetic
ggcuccucccacagucucc

SEQ ID NO: 3147 - RNA, 19 nt, Artificial Sequence
  Synthetic
gguggucugguccagaaug

SEQ ID NO: 3148 - RNA, 19 nt, Artificial Sequence
  Synthetic
cccaacagcauccucugag

SEQ ID NO: 3149 - RNA, 19 nt, Artificial Sequence
  Synthetic
cuggcccagcguggcuccc

SEQ ID NO: 3150 - RNA, 19 nt, Artificial Sequence
  Synthetic
agccuccucugagguaguc

SEQ ID NO: 3151 - RNA, 19 nt, Artificial Sequence
  Synthetic
caguguagcuccuccuaca

SEQ ID NO: 3152 - RNA, 19 nt, Artificial Sequence
  Synthetic
cuccgagguggucugggcc

SEQ ID NO: 3153 - RNA, 19 nt, Artificial Sequence
  Synthetic
ggcucccuccauggcugcc

SEQ ID NO: 3154 - RNA, 19 nt, Artificial Sequence
  Synthetic
cguagucugguccagugug

SEQ ID NO: 3155 - RNA, 19 nt, Artificial Sequence
  Synthetic
cccuggagccuccucugac

SEQ ID NO: 3156 - RNA, 19 nt, Artificial Sequence
  Synthetic
uuggaucagcucggugccc

SEQ ID NO: 3157 - RNA, 19 nt, Artificial Sequence
  Synthetic
gcucgaggcuagaggaguu

SEQ ID NO: 3158 - RNA, 19 nt, Artificial Sequence
  Synthetic
gggggucugguggucugug

SEQ ID NO: 3159 - RNA, 19 nt, Artificial Sequence
  Synthetic
cugcacaggugagguuggg

SEQ ID NO: 3160 - RNA, 19 nt, Artificial Sequence
  Synthetic
uaucugggguguaguuccc

SEQ ID NO: 3161 - RNA, 19 nt, Artificial Sequence
  Synthetic
aaucaguguacugggagau

SEQ ID NO: 3162 - RNA, 19 nt, Artificial Sequence
  Synthetic
caagguccugagacuccca

SEQ ID NO: 3163 - RNA, 19 nt, Artificial Sequence
  Synthetic
agauucgcugccuagcucc

SEQ ID NO: 3164 - RNA, 19 nt, Artificial Sequence
  Synthetic
agauucugaggcccccuga

SEQ ID NO: 3165 - RNA, 19 nt, Artificial Sequence
  Synthetic
cuccucuccuggggccuga

SEQ ID NO: 3166 - RNA, 19 nt, Artificial Sequence
  Synthetic
ugccucuccuaguagguuc

SEQ ID NO: 3167 - RNA, 19 nt, Artificial Sequence
  Synthetic
cauguccugaccuccagcu

SEQ ID NO: 3168 - RNA, 19 nt, Artificial Sequence
  Synthetic
caucagcaucgaaucagcc

SEQ ID NO: 3169 - RNA, 19 nt, Artificial Sequence
  Synthetic
gaggccccuagaucccugc

SEQ ID NO: 3170 - RNA, 19 nt, Artificial Sequence
  Synthetic
aaauauggccugaucagug

SEQ ID NO: 3171 - RNA, 19 nt, Artificial Sequence
  Synthetic
caguggugucacagcauaa

SEQ ID NO: 3172 - RNA, 19 nt, Artificial Sequence
  Synthetic
caaauggggacaccagggc

SEQ ID NO: 3173 - RNA, 19 nt, Artificial Sequence
  Synthetic
uauggggcauacugccacc

SEQ ID NO: 3174 - RNA, 19 nt, Artificial Sequence
  Synthetic
gucuaggccugcugcaggu

SEQ ID NO: 3175 - RNA, 19 nt, Artificial Sequence
  Synthetic
cccacaagguugggucacg

SEQ ID NO: 3176 - RNA, 19 nt, Artificial Sequence
  Synthetic
uuggauuguuccacagucc

SEQ ID NO: 3177 - RNA, 19 nt, Artificial Sequence
  Synthetic
gagacacacccaauucucu

SEQ ID NO: 3178 - RNA, 19 nt, Artificial Sequence
  Synthetic
guagaccugauagcaagag

SEQ ID NO: 3179 - RNA, 19 nt, Artificial Sequence
  Synthetic
auugauguaacgaccacag

SEQ ID NO: 3180 - RNA, 19 nt, Artificial Sequence
  Synthetic
guguuggagcauguggcca

SEQ ID NO: 3181 - RNA, 19 nt, Artificial Sequence
  Synthetic
guguccagaauuuccaugg

SEQ ID NO: 3182 - RNA, 19 nt, Artificial Sequence
  Synthetic
guagcugaggaccagcggg

SEQ ID NO: 3183 - RNA, 19 nt, Artificial Sequence
  Synthetic
ccaggcugacaggucgaug

SEQ ID NO: 3184 - RNA, 19 nt, Artificial Sequence
  Synthetic
ggccugacaguaguaacac

SEQ ID NO: 3185 - RNA, 19 nt, Artificial Sequence
  Synthetic
agccuggugguggacauag

SEQ ID NO: 3186 - RNA, 19 nt, Artificial Sequence
  Synthetic
guucuucacaucuaggaga

SEQ ID NO: 3187 - RNA, 19 nt, Artificial Sequence
  Synthetic
cuuguucuggugggcgaug

SEQ ID NO: 3188 - RNA, 19 nt, Artificial Sequence
  Synthetic
gggcauauccuccccaaac

SEQ ID NO: 3189 - RNA, 19 nt, Artificial Sequence
  Synthetic
uggggcuuagugugggugg

SEQ ID NO: 3190 - RNA, 19 nt, Artificial Sequence
  Synthetic
ugaagagggaccguauucu

SEQ ID NO: 3191 - RNA, 19 nt, Artificial Sequence
  Synthetic
aucgugggccucagaaggu

SEQ ID NO: 3192 - RNA, 19 nt, Artificial Sequence
  Synthetic
augagcuacagcuggucua

SEQ ID NO: 3193 - RNA, 19 nt, Artificial Sequence
  Synthetic
uccaagguacaggcuggaa

SEQ ID NO: 3194 - RNA, 19 nt, Artificial Sequence
  Synthetic
gugggaggcuaccccucau

SEQ ID NO: 3195 - RNA, 19 nt, Artificial Sequence
  Synthetic
uauucaggaugggaugcag

SEQ ID NO: 3196 - RNA, 19 nt, Artificial Sequence
  Synthetic
uuggggaguugcaaaggau

SEQ ID NO: 3197 - RNA, 19 nt, Artificial Sequence
  Synthetic
acacuuaaauaagcacucu

SEQ ID NO: 3198 - RNA, 19 nt, Artificial Sequence
  Synthetic
guucucuuaaaaguauuaa

SEQ ID NO: 3199 - RNA, 19 nt, Artificial Sequence
  Synthetic
ccacaauuaaucgucgcag

SEQ ID NO: 3200 - RNA, 19 nt, Artificial Sequence
  Synthetic
caaugggcagggggagauc

SEQ ID NO: 3201 - RNA, 19 nt, Artificial Sequence
  Synthetic
uggugccccucaagcaggc

SEQ ID NO: 3202 - RNA, 19 nt, Artificial Sequence
  Synthetic
ccuucugggcuggaguagu

SEQ ID NO: 3203 - RNA, 19 nt, Artificial Sequence
  Synthetic
acugagcugccccccuuuc

SEQ ID NO: 3204 - RNA, 19 nt, Artificial Sequence
  Synthetic
cagcucccucuuggggcca

SEQ ID NO: 3205 - RNA, 19 nt, Artificial Sequence
  Synthetic
auguuauccucaugauauc

SEQ ID NO: 3206 - RNA, 19 nt, Artificial Sequence
  Synthetic
uuaacuccccucccgccaa

SEQ ID NO: 3207 - RNA, 19 nt, Artificial Sequence
  Synthetic
ccuugccaugccugccagu

SEQ ID NO: 3208 - RNA, 19 nt, Artificial Sequence
  Synthetic
acuuuauuacauaugcaac

SEQ ID NO: 3209 - RNA, 23 nt, Artificial Sequence
  Synthetic
auccggaggguccuuaucguaga

SEQ ID NO: 3210 - RNA, 23 nt, Artificial Sequence
  Synthetic
aagagaacugcgacgauuaauug

SEQ ID NO: 3211 - RNA, 23 nt, Artificial Sequence
  Synthetic
gugucacuucgaagcgaaauauu

SEQ ID NO: 3212 - RNA, 23 nt, Artificial Sequence
  Synthetic
ggcuggucuaugaccaaaauaug

SEQ ID NO: 3213 - RNA, 23 nt, Artificial Sequence
  Synthetic
caccgugagaguuccaacuuuga

SEQ ID NO: 3214 - RNA, 23 nt, Artificial Sequence
  Synthetic
ccgcuacgagcaggguagguucu

SEQ ID NO: 3215 - RNA, 23 nt, Artificial Sequence
  Synthetic
agcagacaccuacgacucaguuu

SEQ ID NO: 3216 - RNA, 23 nt, Artificial Sequence
  Synthetic
gagcggaugaccacacgagaaaa

SEQ ID NO: 3217 - DNA, 21 bp, Artificial Sequence
  Synthetic
ccggaggguccuuaucguatt

SEQ ID NO: 3218 - DNA, 21 bp, Artificial Sequence
  Synthetic
gagaacugcgacgauuaautt

SEQ ID NO: 3219 - DNA, 21 bp, Artificial Sequence
  Synthetic
gucacuucgaagcgaaauatt

SEQ ID NO: 3220 - DNA, 21 bp, Artificial Sequence
  Synthetic
cuggucuaugaccaaaauatt

SEQ ID NO: 3221 - DNA, 21 bp, Artificial Sequence
  Synthetic
ccgugagaguuccaacuuutt

SEQ ID NO: 3222 - DNA, 21 bp, Artificial Sequence
  Synthetic
gcuacgagcaggguagguutt

SEQ ID NO: 3223 - DNA, 21 bp, Artificial Sequence
  Synthetic
cagacaccuacgacucagutt

SEQ ID NO: 3224 - DNA, 21 bp, Artificial Sequence
  Synthetic
gcggaugaccacacgagaatt

SEQ ID NO: 3225 - DNA, 21 bp, Artificial Sequence
  Synthetic
uacgauaaggacccuccggtt

SEQ ID NO: 3226 - DNA, 21 bp, Artificial Sequence
  Synthetic
auuaaucgucgcaguucuctt

SEQ ID NO: 3227 - DNA, 21 bp, Artificial Sequence
  Synthetic
uauuucgcuucgaagugactt

SEQ ID NO: 3228 - DNA, 21 bp, Artificial Sequence
  Synthetic
uauuuuggucauagaccagtt

SEQ ID NO: 3229 - DNA, 21 bp, Artificial Sequence
  Synthetic
aaaguuggaacucucacggtt

SEQ ID NO: 3230 - DNA, 21 bp, Artificial Sequence
  Synthetic
aaccuacccugcucguagctt

SEQ ID NO: 3231 - DNA, 21 bp, Artificial Sequence
  Synthetic
acugagucguaggugucugtt

SEQ ID NO: 3232 - DNA, 21 bp, Artificial Sequence
  Synthetic
uucucguguggucauccgctt

SEQ ID NO: 3233 - DNA, 21 bp, Artificial Sequence
  Synthetic
  misc_feature (1)..(1): 5'-3 attached inverted deoxyabasic moiety.
  misc_feature (1)..(2): 2'-deoxy-2'-fluoro
  misc_feature (9)..(13): 2'-deoxy-2'-fluoro
  misc_feature (15)..(16): 2'-deoxy-2'-fluoro
  misc_feature (18)..(18): 2'-deoxy-2'-fluoro
  misc_feature (21)..(21): 3'-3 attached inverted deoxyabasic moiety.
ccggaggguccuuaucguatt

SEQ ID NO: 3234 - DNA, 21 bp, Artificial Sequence
  Synthetic
  misc_feature (1)..(1): 5'-3 attached inverted deoxyabasic moiety.
  misc_feature (6)..(7): 2'-deoxy-2'-fluoro
  misc_feature (9)..(9): 2'-deoxy-2'-fluoro
  misc_feature (12)..(12): 2'-deoxy-2'-fluoro
  misc_feature (15)..(16): 2'-deoxy-2'-fluoro
  misc_feature (19)..(19): 2'-deoxy-2'-fluoro
  misc_feature (21)..(21): 3'-3 attached inverted deoxyabasic moiety.
gagaacugcgacgauuaautt

SEQ ID NO: 3235 - DNA, 21 bp, Artificial Sequence
  Synthetic
  misc_feature (1)..(1): 5'-3 attached inverted deoxyabasic moiety.
  misc_feature (2)..(3): 2'-deoxy-2'-fluoro
  misc_feature (5)..(8): 2'-deoxy-2'-fluoro
  misc_feature (13)..(13): 2'-deoxy-2'-fluoro
  misc_feature (18)..(18): 2'-deoxy-2'-fluoro
  misc_feature (21)..(21): 3'-3 attached inverted deoxyabasic moiety.
gucacuucgaagcgaaauatt

SEQ ID NO: 3236 - DNA, 21 bp, Artificial Sequence
  Synthetic
  misc_feature (1)..(1): 5'-3 attached inverted deoxyabasic moiety.
  misc_feature (1)..(2): 2'-deoxy-2'-fluoro
  misc_feature (5)..(7): 2'-deoxy-2'-fluoro
  misc_feature (9)..(9): 2'-deoxy-2'-fluoro
  misc_feature (12)..(13): 2'-deoxy-2'-fluoro
  misc_feature (18)..(18): 2'-deoxy-2'-fluoro
  misc_feature (21)..(21): 3'-3 attached inverted deoxyabasic moiety.
cuggucuaugaccaaaauatt

SEQ ID NO: 3237 - DNA, 21 bp, Artificial Sequence
  Synthetic
  misc_feature (1)..(1): 5'-3 attached inverted deoxyabasic moiety.
  misc_feature (1)..(2): 2'-deoxy-2'-fluoro
  misc_feature (4)..(4): 2'-deoxy-2'-fluoro
  misc_feature (10)..(13): 2'-deoxy-2'-fluoro
  misc_feature (16)..(19): 2'-deoxy-2'-fluoro
  misc_feature (21)..(21): 3'-3 attached inverted deoxyabasic moiety.
ccgugagaguuccaacuuutt

SEQ ID NO: 3238 - DNA, 21 bp, Artificial Sequence
  Synthetic
  misc_feature (1)..(1): 5'-3 attached inverted deoxyabasic moiety.
  misc_feature (2)..(3): 2'-deoxy-2'-fluoro
  misc_feature (5)..(5): 2'-deoxy-2'-fluoro
  misc_feature (9)..(9): 2'-deoxy-2'-fluoro
  misc_feature (14)..(14): 2'-deoxy-2'-fluoro
  misc_feature (18)..(19): 2'-deoxy-2'-fluoro
  misc_feature (21)..(21): 3'-3 attached inverted deoxyabasic moiety.
gcuacgagcaggguagguutt

SEQ ID NO: 3239 - DNA, 21 bp, Artificial Sequence
  Synthetic
  misc_feature (1)..(1): 5'-3 attached inverted deoxyabasic moiety.
  misc_feature (1)..(1): 2'-deoxy-2'-fluoro
  misc_feature (5)..(5): 2'-deoxy-2'-fluoro
  misc_feature (7)..(9): 2'-deoxy-2'-fluoro
  misc_feature (11)..(11): 2'-deoxy-2'-fluoro
  misc_feature (14)..(16): 2'-deoxy-2'-fluoro
  misc_feature (19)..(19): 2'-deoxy-2'-fluoro
  misc_feature (21)..(21): 3'-3 attached inverted deoxyabasic moiety.
cagacaccuacgacucagutt

SEQ ID NO: 3240 - DNA, 21 bp, Artificial Sequence
  Synthetic
  misc_feature (1)..(1): 5'-3 attached inverted deoxyabasic moiety.
  misc_feature (2)..(2): 2'-deoxy-2'-fluoro
  misc_feature (6)..(6): 2'-deoxy-2'-fluoro
  misc_feature (9)..(10): 2'-deoxy-2'-fluoro
  misc_feature (12)..(12): 2'-deoxy-2'-fluoro
  misc_feature (14)..(14): 2'-deoxy-2'-fluoro
  misc_feature (21)..(21): 3'-3 attached inverted deoxyabasic moiety.
gcggaugaccacacgagaatt

SEQ ID NO: 3241 - DNA, 21 bp, Artificial Sequence
  Synthetic
  misc_feature (1)..(1): 2'-deoxy-2'-fluoro
  misc_feature (3)..(3): 2'-deoxy-2'-fluoro
  misc_feature (6)..(6): 2'-deoxy-2'-fluoro
  misc_feature (12)..(17): 2'-deoxy-2'-fluoro
  misc_feature (20)..(21): phosphorothioate linkage
uacgauaaggacccuccggtt

SEQ ID NO: 3242 - DNA, 21 bp, Artificial Sequence
  Synthetic
  misc_feature (2)..(3): 2'-deoxy-2'-fluoro
  misc_feature (6)..(7): 2'-deoxy-2'-fluoro
  misc_feature (9)..(10): 2'-deoxy-2'-fluoro
  misc_feature (12)..(12): 2'-deoxy-2'-fluoro
  misc_feature (15)..(19): 2'-deoxy-2'-fluoro
  misc_feature (20)..(21): phosphorothioate linkage
auuaaucgucgcaguucuctt

SEQ ID NO: 3243 - DNA, 21 bp, Artificial Sequence
  Synthetic
  misc_feature (1)..(1): 2'-deoxy-2'-fluoro
  misc_feature (3)..(6): 2'-deoxy-2'-fluoro
  misc_feature (8)..(11): 2'-deoxy-2'-fluoro
  misc_feature (16)..(16): 2'-deoxy-2'-fluoro
  misc_feature (19)..(19): 2'-deoxy-2'-fluoro
  misc_feature (20)..(21): phosphorothioate linkage
uauuucgcuucgaagugactt

SEQ ID NO: 3244 - DNA, 21 bp, Artificial Sequence
  Synthetic
  misc_feature (1)..(1): 2'-deoxy-2'-fluoro
  misc_feature (3)..(6): 2'-deoxy-2'-fluoro
  misc_feature (9)..(10): 2'-deoxy-2'-fluoro
  misc_feature (12)..(12): 2'-deoxy-2'-fluoro
  misc_feature (16)..(17): 2'-deoxy-2'-fluoro
  misc_feature (20)..(21): phosphorothioate linkage
uauuuuggucauagaccagtt

SEQ ID NO: 3245 - DNA, 21 bp, Artificial Sequence
  Synthetic
  misc_feature (5)..(6): 2'-deoxy-2'-fluoro
  misc_feature (11)..(15): 2'-deoxy-2'-fluoro
  misc_feature (17)..(17): 2'-deoxy-2'-fluoro
  misc_feature (20)..(21): phosphorothioate linkage
aaaguuggaacucucacggtt

SEQ ID NO: 3246 - DNA, 21 bp, Artificial Sequence
  Synthetic
  misc_feature (3)..(5): 2'-deoxy-2'-fluoro
  misc_feature (7)..(10): 2'-deoxy-2'-fluoro
  misc_feature (12)..(14): 2'-deoxy-2'-fluoro
  misc_feature (16)..(16): 2'-deoxy-2'-fluoro
  misc_feature (19)..(19): 2'-deoxy-2'-fluoro
  misc_feature (20)..(21): phosphorothioate linkage
aaccuacccugcucguagctt

SEQ ID NO: 3247 - DNA, 21 bp, Artificial Sequence
  Synthetic
  misc_feature (2)..(3): 2'-deoxy-2'-fluoro
  misc_feature (7)..(8): 2'-deoxy-2'-fluoro
  misc_feature (10)..(10): 2'-deoxy-2'-fluoro
  misc_feature (14)..(14): 2'-deoxy-2'-fluoro
  misc_feature (16)..(18): 2'-deoxy-2'-fluoro
  misc_feature (20)..(21): phosphorothioate linkage
acugagucguaggugucugtt

SEQ ID NO: 3248 - DNA, 21 bp, Artificial Sequence
  Synthetic
  misc_feature (1)..(5): 2'-deoxy-2'-fluoro
  misc_feature (7)..(7): 2'-deoxy-2'-fluoro
  misc_feature (9)..(9): 2'-deoxy-2'-fluoro
  misc_feature (12)..(13): 2'-deoxy-2'-fluoro
  misc_feature (15)..(17): 2'-deoxy-2'-fluoro
  misc_feature (19)..(19): 2'-deoxy-2'-fluoro
  misc_feature (20)..(21): phosphorothioate linkage
uucucguguggucauccgctt

SEQ ID NO: 3249 - DNA, 21 bp, Artificial Sequence
  Synthetic
  misc_feature (1)..(1): 5'-3 attached inverted deoxyabasic moiety.
  misc_feature (1)..(2): 2'-deoxy-2'-fluoro
  misc_feature (3)..(8): deoxy
  misc_feature (9)..(13): 2'-deoxy-2'-fluoro
  misc_feature (14)..(14): deoxy
  misc_feature (15)..(16): 2'-deoxy-2'-fluoro
  misc_feature (17)..(17): deoxy
  misc_feature (18)..(18): 2'-deoxy-2'-fluoro
  misc_feature (19)..(19): deoxy
  misc_feature (21)..(21): 3'-3 attached inverted deoxyabasic moiety.
ccggaggguccuuaucguatt

SEQ ID NO: 3250 - DNA, 21 bp, Artificial Sequence
  Synthetic
  misc_feature (1)..(1): 5'-3 attached inverted deoxyabasic moiety.
  misc_feature (1)..(5): deoxy
  misc_feature (6)..(7): 2'-deoxy-2'-fluoro
  misc_feature (8)..(8): deoxy
  misc_feature (9)..(9): 2'-deoxy-2'-fluoro
  misc_feature (10)..(11): deoxy
  misc_feature (12)..(12): 2'-deoxy-2'-fluoro
  misc_feature (13)..(14): deoxy
  misc_feature (15)..(16): 2'-deoxy-2'-fluoro
  misc_feature (17)..(18): deoxy
  misc_feature (19)..(19): 2'-deoxy-2'-fluoro
  misc_feature (21)..(21): 3'-3 attached inverted deoxyabasic moiety.
gagaacugcgacgauuaautt

SEQ ID NO: 3251 - DNA, 21 bp, Artificial Sequence
  Synthetic
  misc_feature (1)..(1): 5'-3 attached inverted deoxyabasic moiety.
  misc_feature (1)..(1): deoxy
  misc_feature (2)..(3): 2'-deoxy-2'-fluoro
  misc_feature (4)..(4): deoxy
  misc_feature (5)..(8): 2'-deoxy-2'-fluoro
  misc_feature (9)..(12): deoxy
  misc_feature (13)..(13): 2'-deoxy-2'-fluoro
  misc_feature (14)..(17): deoxy
  misc_feature (18)..(18): 2'-deoxy-2'-fluoro
  misc_feature (19)..(19): deoxy
  misc_feature (21)..(21): 3'-3 attached inverted deoxyabasic moiety.
gucacuucgaagcgaaauatt

SEQ ID NO: 3252 - DNA, 21 bp, Artificial Sequence
  Synthetic
  misc_feature (1)..(1): 5'-3 attached inverted deoxyabasic moiety.
  misc_feature (1)..(2): 2'-deoxy-2'-fluoro
  misc_feature (3)..(4): deoxy
  misc_feature (5)..(7): 2'-deoxy-2'-fluoro
  misc_feature (8)..(8): deoxy
  misc_feature (9)..(9): 2'-deoxy-2'-fluoro
  misc_feature (10)..(11): deoxy
  misc_feature (12)..(13): 2'-deoxy-2'-fluoro
  misc_feature (14)..(17): deoxy
  misc_feature (18)..(18): 2'-deoxy-2'-fluoro
  misc_feature (19)..(19): deoxy
  misc_feature (21)..(21): 3'-3 attached inverted deoxyabasic moiety.
cuggucuaugaccaaaauatt

SEQ ID NO: 3253 - DNA, 21 bp, Artificial Sequence
  Synthetic
  misc_feature (1)..(1): 5'-3 attached inverted deoxyabasic moiety.
  misc_feature (1)..(2): 2'-deoxy-2'-fluoro
  misc_feature (3)..(3): deoxy
  misc_feature (4)..(4): 2'-deoxy-2'-fluoro
  misc_feature (5)..(9): deoxy
  misc_feature (10)..(13): 2'-deoxy-2'-fluoro
  misc_feature (14)..(15): deoxy
  misc_feature (16)..(19): 2'-deoxy-2'-fluoro
  misc_feature (21)..(21): 3'-3 attached inverted deoxyabasic moiety.
ccgugagaguuccaacuuutt

SEQ ID NO: 3254 - DNA, 21 bp, Artificial Sequence
  Synthetic
  misc_feature (1)..(1): 5'-3 attached inverted deoxyabasic moiety.
  misc_feature (1)..(1): deoxy
  misc_feature (2)..(3): 2'-deoxy-2'-fluoro
  misc_feature (4)..(4): deoxy
  misc_feature (5)..(5): 2'-deoxy-2'-fluoro
  misc_feature (6)..(8): deoxy
  misc_feature (9)..(9): 2'-deoxy-2'-fluoro
  misc_feature (10)..(13): deoxy
  misc_feature (14)..(14): 2'-deoxy-2'-fluoro
  misc_feature (15)..(17): deoxy
  misc_feature (18)..(19): 2'-deoxy-2'-fluoro
  misc_feature (21)..(21): 3'-3 attached inverted deoxyabasic moiety.
gcuacgagcaggguagguutt

SEQ ID NO: 3255 - DNA, 21 bp, Artificial Sequence
  Synthetic
  misc_feature (1)..(1): 5'-3 attached inverted deoxyabasic moiety.
  misc_feature (1)..(1): 2'-deoxy-2'-fluoro
  misc_feature (2)..(4): deoxy
  misc_feature (5)..(5): 2'-deoxy-2'-fluoro
  misc_feature (6)..(6): deoxy
  misc_feature (7)..(9): 2'-deoxy-2'-fluoro
  misc_feature (10)..(10): deoxy
  misc_feature (11)..(11): 2'-deoxy-2'-fluoro
  misc_feature (12)..(13): deoxy
  misc_feature (14)..(16): 2'-deoxy-2'-fluoro
  misc_feature (17)..(18): deoxy
  misc_feature (19)..(19): 2'-deoxy-2'-fluoro
  misc_feature (21)..(21): 3'-3 attached inverted deoxyabasic moiety.
cagacaccuacgacucagutt

SEQ ID NO: 3256 - DNA, 21 bp, Artificial Sequence
  Synthetic
  misc_feature (1)..(1): 5'-3 attached inverted deoxyabasic moiety.
  misc_feature (1)..(1): deoxy
  misc_feature (2)..(2): 2'-deoxy-2'-fluoro
  misc_feature (3)..(5): deoxy
  misc_feature (6)..(6): 2'-deoxy-2'-fluoro
  misc_feature (7)..(8): deoxy
  misc_feature (9)..(10): 2'-deoxy-2'-fluoro
  misc_feature (11)..(11): deoxy
  misc_feature (12)..(12): 2'-deoxy-2'-fluoro
  misc_feature (13)..(13): deoxy
  misc_feature (14)..(14): 2'-deoxy-2'-fluoro
  misc_feature (15)..(19): deoxy
  misc_feature (21)..(21): 3'-3 attached inverted deoxyabasic moiety.
gcggaugaccacacgagaatt

SEQ ID NO: 3257 - DNA, 21 bp, Artificial Sequence
  Synthetic
  misc_feature (1)..(1): 2'-deoxy-2'-fluoro
  misc_feature (2)..(2): deoxy
  misc_feature (3)..(3): 2'-deoxy-2'-fluoro
  misc_feature (4)..(5): deoxy
  misc_feature (6)..(6): 2'-deoxy-2'-fluoro
  misc_feature (7)..(11): deoxy
  misc_feature (12)..(17): 2'-deoxy-2'-fluoro
  misc_feature (18)..(19): deoxy
  misc_feature (20)..(21): phosphorothioate linkage
uacgauaaggacccuccggtt

SEQ ID NO: 3258 - DNA, 21 bp, Artificial Sequence
  Synthetic
  misc_feature (1)..(1): deoxy
  misc_feature (2)..(3): 2'-deoxy-2'-fluoro
  misc_feature (4)..(5): deoxy
  misc_feature (6)..(7): 2'-deoxy-2'-fluoro
  misc_feature (8)..(8): deoxy
  misc_feature (9)..(10): 2'-deoxy-2'-fluoro
  misc_feature (11)..(11): deoxy
  misc_feature (12)..(12): 2'-deoxy-2'-fluoro
  misc_feature (13)..(14): deoxy
  misc_feature (15)..(19): 2'-deoxy-2'-fluoro
  misc_feature (20)..(21): phosphorothioate linkage
auuaaucgucgcaguucuctt

SEQ ID NO: 3259 - DNA, 21 bp, Artificial Sequence
  Synthetic
  misc_feature (1)..(1): 2'-deoxy-2'-fluoro
  misc_feature (2)..(2): deoxy
  misc_feature (3)..(6): 2'-deoxy-2'-fluoro
  misc_feature (7)..(7): deoxy
  misc_feature (8)..(11): 2'-deoxy-2'-fluoro
  misc_feature (12)..(15): deoxy
  misc_feature (16)..(16): 2'-deoxy-2'-fluoro
  misc_feature (17)..(18): deoxy
  misc_feature (19)..(19): 2'-deoxy-2'-fluoro
  misc_feature (20)..(21): phosphorothioate linkage
uauuucgcuucgaagugactt

SEQ ID NO: 3260 - DNA, 21 bp, Artificial Sequence
  Synthetic
  misc_feature (1)..(1): 2'-deoxy-2'-fluoro
  misc_feature (2)..(2): deoxy
  misc_feature (3)..(6): 2'-deoxy-2'-fluoro
  misc_feature (7)..(8): deoxy
  misc_feature (9)..(10): 2'-deoxy-2'-fluoro
  misc_feature (11)..(11): deoxy
  misc_feature (12)..(12): 2'-deoxy-2'-fluoro
  misc_feature (13)..(15): deoxy
  misc_feature (16)..(17): 2'-deoxy-2'-fluoro
  misc_feature (18)..(19): deoxy
  misc_feature (20)..(21): phosphorothioate linkage
uauuuuggucauagaccagtt

SEQ ID NO: 3261 - DNA, 21 bp, Artificial Sequence
  Synthetic
  misc_feature (1)..(4): deoxy
  misc_feature (5)..(6): 2'-deoxy-2'-fluoro
  misc_feature (7)..(10): deoxy
  misc_feature (11)..(15): 2'-deoxy-2'-fluoro
  misc_feature (16)..(16): deoxy
  misc_feature (17)..(17): 2'-deoxy-2'-fluoro
  misc_feature (18)..(19): deoxy
  misc_feature (20)..(21): phosphorothioate linkage
aaaguuggaacucucacggtt

SEQ ID NO: 3262 - DNA, 21 bp, Artificial Sequence
  Synthetic
  misc_feature (1)..(2): deoxy
  misc_feature (3)..(5): 2'-deoxy-2'-fluoro
  misc_feature (6)..(6): deoxy
  misc_feature (7)..(10): 2'-deoxy-2'-fluoro
  misc_feature (11)..(11): deoxy
  misc_feature (12)..(14): 2'-deoxy-2'-fluoro
  misc_feature (15)..(15): deoxy
  misc_feature (16)..(16): 2'-deoxy-2'-fluoro
  misc_feature (17)..(18): deoxy
  misc_feature (19)..(19): 2'-deoxy-2'-fluoro
  misc_feature (20)..(21): phosphorothioate linkage
aaccuacccugcucguagctt

SEQ ID NO: 3263 - DNA, 21 bp, Artificial Sequence
  Synthetic
  misc_feature (1)..(1): deoxy
  misc_feature (2)..(3): 2'-deoxy-2'-fluoro
  misc_feature (4)..(6): deoxy
  misc_feature (7)..(8): 2'-deoxy-2'-fluoro
  misc_feature (9)..(9): deoxy
  misc_feature (10)..(10): 2'-deoxy-2'-fluoro
  misc_feature (11)..(13): deoxy
  misc_feature (14)..(14): 2'-deoxy-2'-fluoro
  misc_feature (15)..(15): deoxy
  misc_feature (16)..(18): 2'-deoxy-2'-fluoro
  misc_feature (19)..(19): deoxy
  misc_feature (20)..(21): phosphorothioate linkage
acugagucguaggugucugtt

SEQ ID NO: 3264 - DNA, 21 bp, Artificial Sequence
  Synthetic
  misc_feature (1)..(5): 2'-deoxy-2'-fluoro
  misc_feature (6)..(6): deoxy
  misc_feature (7)..(7): 2'-deoxy-2'-fluoro
  misc_feature (8)..(8): deoxy
  misc_feature (9)..(9): 2'-deoxy-2'-fluoro
  misc_feature (10)..(11): deoxy
  misc_feature (12)..(13): 2'-deoxy-2'-fluoro
  misc_feature (14)..(14): deoxy
  misc_feature (15)..(17): 2'-deoxy-2'-fluoro
  misc_feature (18)..(18): deoxy
  misc_feature (19)..(19): 2'-deoxy-2'-fluoro
  misc_feature (20)..(21): phosphorothioate linkage
uucucguguggucauccgctt

SEQ ID NO: 3265 - DNA, 21 bp, Artificial Sequence
  Synthetic
  misc_feature (1)..(1): 5'-3 attached inverted deoxyabasic moiety.
  misc_feature (1)..(2): 2'-deoxy-2'-fluoro
  misc_feature (3)..(8): 2'-O-methyl
  misc_feature (9)..(13): 2'-deoxy-2'-fluoro
  misc_feature (14)..(14): 2'-O-methyl
  misc_feature (15)..(16): 2'-deoxy-2'-fluoro
  misc_feature (17)..(17): 2'-O-methyl
  misc_feature (18)..(18): 2'-deoxy-2'-fluoro
  misc_feature (19)..(19): 2'-O-methyl
  misc_feature (21)..(21): 3'-3 attached inverted deoxyabasic moiety.
ccggaggguccuuaucguatt

SEQ ID NO: 3266 - DNA, 21 bp, Artificial Sequence
  Synthetic
  misc_feature (1)..(1): 5'-3 attached inverted deoxyabasic moiety.
  misc_feature (1)..(5): 2'-O-methyl
  misc_feature (6)..(7): 2'-deoxy-2'-fluoro
  misc_feature (8)..(8): 2'-O-methyl
  misc_feature (9)..(9): 2'-deoxy-2'-fluoro
  misc_feature (10)..(11): 2'-O-methyl
  misc_feature (12)..(12): 2'-deoxy-2'-fluoro
  misc_feature (13)..(14): 2'-O-methyl
  misc_feature (15)..(16): 2'-deoxy-2'-fluoro
  misc_feature (17)..(18): 2'-O-methyl
  misc_feature (19)..(19): 2'-deoxy-2'-fluoro
  misc_feature (21)..(21): 3'-3 attached inverted deoxyabasic moiety.
gagaacugcgacgauuaautt

SEQ ID NO: 3267 - DNA, 21 bp, Artificial Sequence
  Synthetic
  misc_feature (1)..(1): 5'-3 attached inverted deoxyabasic moiety.
  misc_feature (1)..(1): 2'-O-methyl
  misc_feature (2)..(3): 2'-deoxy-2'-fluoro
  misc_feature (4)..(4): 2'-O-methyl
  misc_feature (5)..(8): 2'-deoxy-2'-fluoro
  misc_feature (9)..(12): 2'-O-methyl
  misc_feature (13)..(13): 2'-deoxy-2'-fluoro
  misc_feature (14)..(17): 2'-O-methyl
  misc_feature (18)..(18): 2'-deoxy-2'-fluoro
  misc_feature (19)..(19): 2'-O-methyl
  misc_feature (21)..(21): 3'-3 attached inverted deoxyabasic moiety.
gucacuucgaagcgaaauatt

SEQ ID NO: 3268 - DNA, 21 bp, Artificial Sequence
  Synthetic
  misc_feature (1)..(1): 5'-3 attached inverted deoxyabasic moiety.
  misc_feature (1)..(2): 2'-deoxy-2'-fluoro
  misc_feature (3)..(4): 2'-O-methyl
  misc_feature (5)..(7): 2'-deoxy-2'-fluoro
  misc_feature (8)..(8): 2'-O-methyl
  misc_feature (9)..(9): 2'-deoxy-2'-fluoro
  misc_feature (10)..(11): 2'-O-methyl
  misc_feature (12)..(13): 2'-deoxy-2'-fluoro
  misc_feature (14)..(17): 2'-O-methyl
  misc_feature (18)..(18): 2'-deoxy-2'-fluoro
  misc_feature (19)..(19): 2'-O-methyl
  misc_feature (21)..(21): 3'-3 attached inverted deoxyabasic moiety.
cuggucuaugaccaaaauatt

SEQ ID NO: 3269 - DNA, 21 bp, Artificial Sequence
  Synthetic
  misc_feature (1)..(1): 5'-3 attached inverted deoxyabasic moiety.
  misc_feature (1)..(2): 2'-deoxy-2'-fluoro
  misc_feature (3)..(3): 2'-O-methyl
  misc_feature (4)..(4): 2'-deoxy-2'-fluoro
  misc_feature (5)..(9): 2'-O-methyl
  misc_feature (10)..(13): 2'-deoxy-2'-fluoro
  misc_feature (14)..(15): 2'-O-methyl
  misc_feature (16)..(19): 2'-deoxy-2'-fluoro
  misc_feature (21)..(21): 3'-3 attached inverted deoxyabasic moiety.
ccgugagaguuccaacuuutt

SEQ ID NO: 3270 - DNA, 21 bp, Artificial Sequence
  Synthetic
  misc_feature (1)..(1): 5'-3 attached inverted deoxyabasic moiety.
  misc_feature (1)..(1): 2'-O-methyl
  misc_feature (2)..(3): 2'-deoxy-2'-fluoro
  misc_feature (4)..(4): 2'-O-methyl
  misc_feature (5)..(5): 2'-deoxy-2'-fluoro
  misc_feature (6)..(8): 2'-O-methyl
  misc_feature (9)..(9): 2'-deoxy-2'-fluoro
  misc_feature (10)..(13): 2'-O-methyl
  misc_feature (14)..(14): 2'-deoxy-2'-fluoro
  misc_feature (15)..(17): 2'-O-methyl
  misc_feature (18)..(19): 2'-deoxy-2'-fluoro
  misc_feature (21)..(21): 3'-3 attached inverted deoxyabasic moiety.
gcuacgagcaggguagguutt

SEQ ID NO: 3271 - DNA, 21 bp, Artificial Sequence
  Synthetic
  misc_feature (1)..(1): 5'-3 attached inverted deoxyabasic moiety.
  misc_feature (1)..(1): 2'-deoxy-2'-fluoro
  misc_feature (2)..(4): 2'-O-methyl
  misc_feature (5)..(5): 2'-deoxy-2'-fluoro
  misc_feature (6)..(6): 2'-O-methyl
  misc_feature (7)..(9): 2'-deoxy-2'-fluoro
  misc_feature (10)..(10): 2'-O-methyl
  misc_feature (11)..(11): 2'-deoxy-2'-fluoro
  misc_feature (12)..(13): 2'-O-methyl
  misc_feature (14)..(16): 2'-deoxy-2'-fluoro
  misc_feature (17)..(18): 2'-O-methyl
  misc_feature (19)..(19): 2'-deoxy-2'-fluoro
  misc_feature (21)..(21): 3'-3 attached inverted deoxyabasic moiety.
cagacaccuacgacucagutt

SEQ ID NO: 3272 - DNA, 21 bp, Artificial Sequence
  Synthetic
  misc_feature (1)..(1): 5'-3 attached inverted deoxyabasic moiety.
  misc_feature (1)..(1): 2'-O-methyl
  misc_feature (2)..(2): 2'-deoxy-2'-fluoro
  misc_feature (3)..(5): 2'-O-methyl
  misc_feature (6)..(6): 2'-deoxy-2'-fluoro
  misc_feature (7)..(8): 2'-O-methyl
  misc_feature (9)..(10): 2'-deoxy-2'-fluoro
  misc_feature (11)..(11): 2'-O-methyl
  misc_feature (12)..(12): 2'-deoxy-2'-fluoro
  misc_feature (13)..(13): 2'-O-methyl
  misc_feature (14)..(14): 2'-deoxy-2'-fluoro
  misc_feature (15)..(19): 2'-O-methyl
  misc_feature (21)..(21): 3'-3 attached inverted deoxyabasic moiety.
gcggaugaccacacgagaatt

SEQ ID NO: 3273 - DNA, 21 bp, Artificial Sequence
  Synthetic
  misc_feature (1)..(1): 2'-deoxy-2'-fluoro
  misc_feature (2)..(2): 2'-O-methyl
  misc_feature (3)..(3): 2'-deoxy-2'-fluoro
  misc_feature (4)..(5): 2'-O-methyl
  misc_feature (6)..(6): 2'-deoxy-2'-fluoro
  misc_feature (7)..(11): 2'-O-methyl
  misc_feature (12)..(17): 2'-deoxy-2'-fluoro
  misc_feature (18)..(19): 2'-O-methyl
  misc_feature (20)..(21): phosphorothioate linkage
uacgauaaggacccuccggtt

SEQ ID NO: 3274 - DNA, 21 bp, Artificial Sequence
  Synthetic
  misc_feature (1)..(1): 2'-O-methyl
  misc_feature (2)..(3): 2'-deoxy-2'-fluoro
  misc_feature (4)..(5): 2'-O-methyl
  misc_feature (6)..(7): 2'-deoxy-2'-fluoro
  misc_feature (8)..(8): 2'-O-methyl
  misc_feature (9)..(10): 2'-deoxy-2'-fluoro
  misc_feature (11)..(11): 2'-O-methyl
  misc_feature (12)..(12): 2'-deoxy-2'-fluoro
  misc_feature (13)..(14): 2'-O-methyl
  misc_feature (15)..(19): 2'-deoxy-2'-fluoro
  misc_feature (20)..(21): phosphorothioate linkage
auuaaucgucgcaguucuctt

SEQ ID NO: 3275 - DNA, 21 bp, Artificial Sequence
  Synthetic
  misc_feature (1)..(1): 2'-deoxy-2'-fluoro
  misc_feature (2)..(2): 2'-O-methyl
  misc_feature (3)..(6): 2'-deoxy-2'-fluoro
  misc_feature (7)..(7): 2'-O-methyl
  misc_feature (8)..(11): 2'-deoxy-2'-fluoro
  misc_feature (12)..(15): 2'-O-methyl
  misc_feature (16)..(16): 2'-deoxy-2'-fluoro
  misc_feature (17)..(18): 2'-O-methyl
  misc_feature (19)..(19): 2'-deoxy-2'-fluoro
  misc_feature (20)..(21): phosphorothioate linkage
uauuucgcuucgaagugactt

SEQ ID NO: 3276 - DNA, 21 bp, Artificial Sequence
  Synthetic
  misc_feature (1)..(1): 2'-deoxy-2'-fluoro
  misc_feature (2)..(2): 2'-O-methyl
  misc_feature (3)..(6): 2'-deoxy-2'-fluoro
  misc_feature (7)..(8): 2'-O-methyl
  misc_feature (9)..(10): 2'-deoxy-2'-fluoro
  misc_feature (11)..(11): 2'-O-methyl
  misc_feature (12)..(12): 2'-deoxy-2'-fluoro
  misc_feature (13)..(15): 2'-O-methyl
  misc_feature (16)..(17): 2'-deoxy-2'-fluoro
  misc_feature (18)..(19): 2'-O-methyl
  misc_feature (20)..(21): phosphorothioate linkage
uauuuuggucauagaccagtt

SEQ ID NO: 3277 - DNA, 21 bp, Artificial Sequence
  Synthetic
  misc_feature (1)..(4): 2'-O-methyl
  misc_feature (5)..(6): 2'-deoxy-2'-fluoro
  misc_feature (7)..(10): 2'-O-methyl
  misc_feature (11)..(15): 2'-deoxy-2'-fluoro
  misc_feature (16)..(16): 2'-O-methyl
  misc_feature (17)..(17): 2'-deoxy-2'-fluoro
  misc_feature (18)..(19): 2'-O-methyl
  misc_feature (20)..(21): phosphorothioate linkage
aaaguuggaacucucacggtt

SEQ ID NO: 3278 - DNA, 21 bp, Artificial Sequence
  Synthetic
  misc_feature (1)..(2): 2'-O-methyl
  misc_feature (3)..(5): 2'-deoxy-2'-fluoro
  misc_feature (6)..(6): 2'-O-methyl
  misc_feature (7)..(10): 2'-deoxy-2'-fluoro
  misc_feature (11)..(11): 2'-O-methyl
  misc_feature (12)..(14): 2'-deoxy-2'-fluoro
  misc_feature (15)..(15): 2'-O-methyl
  misc_feature (16)..(16): 2'-deoxy-2'-fluoro
  misc_feature (17)..(18): 2'-O-methyl
  misc_feature (19)..(19): 2'-deoxy-2'-fluoro
  misc_feature (20)..(21): phosphorothioate linkage
aaccuacccugcucguagctt

SEQ ID NO: 3279 - DNA, 21 bp, Artificial Sequence
  Synthetic
  misc_feature (1)..(1): 2'-O-methyl
  misc_feature (2)..(3): 2'-deoxy-2'-fluoro
  misc_feature (4)..(6): 2'-O-methyl
  misc_feature (7)..(8): 2'-deoxy-2'-fluoro
  misc_feature (9)..(9): 2'-O-methyl
  misc_feature (10)..(10): 2'-deoxy-2'-fluoro
  misc_feature (11)..(13): 2'-O-methyl
  misc_feature (14)..(14): 2'-deoxy-2'-fluoro
  misc_feature (15)..(15): 2'-O-methyl
  misc_feature (16)..(18): 2'-deoxy-2'-fluoro
  misc_feature (19)..(19): 2'-O-methyl
  misc_feature (20)..(21): phosphorothioate linkage
acugagucguaggugucugtt

SEQ ID NO: 3280 - DNA, 21 bp, Artificial Sequence
  Synthetic
  misc_feature (1)..(5): 2'-deoxy-2'-fluoro
  misc_feature (6)..(6): 2'-O-methyl
  misc_feature (7)..(7): 2'-deoxy-2'-fluoro
  misc_feature (8)..(8): 2'-O-methyl
  misc_feature (9)..(9): 2'-deoxy-2'-fluoro
  misc_feature (10)..(11): 2'-O-methyl
  misc_feature (12)..(13): 2'-deoxy-2'-fluoro
  misc_feature (14)..(14): 2'-O-methyl
  misc_feature (15)..(17): 2'-deoxy-2'-fluoro
  misc_feature (18)..(18): 2'-O-methyl
  misc_feature (19)..(19): 2'-deoxy-2'-fluoro
  misc_feature (20)..(21): phosphorothioate linkage
uucucguguggucauccgctt

SEQ ID NO: 3281 - DNA, 21 bp, Artificial Sequence
  Synthetic
  misc_feature (1)..(1): 5'-3 attached inverted deoxyabasic moiety.
  misc_feature (21)..(21): 3'-3 attached inverted deoxyabasic moiety.
ccggaggguccuuaucguatt

SEQ ID NO: 3282 - DNA, 21 bp, Artificial Sequence
  Synthetic
  misc_feature (1)..(1): 5'-3 attached inverted deoxyabasic moiety.
  misc_feature (21)..(21): 3'-3 attached inverted deoxyabasic moiety.
gagaacugcgacgauuaautt

SEQ ID NO: 3283 - DNA, 21 bp, Artificial Sequence
  Synthetic
  misc_feature (1)..(1): 5'-3 attached inverted deoxyabasic moiety.
  misc_feature (21)..(21): 3'-3 attached inverted deoxyabasic moiety.
gucacuucgaagcgaaauatt

SEQ ID NO: 3284 - DNA, 21 bp, Artificial Sequence
  Synthetic
  misc_feature (1)..(1): 5'-3 attached inverted deoxyabasic moiety.
  misc_feature (21)..(21): 3'-3 attached inverted deoxyabasic moiety.
cuggucuaugaccaaaauatt

SEQ ID NO: 3285 - DNA, 21 bp, Artificial Sequence
  Synthetic
  misc_feature (1)..(1): 5'-3 attached inverted deoxyabasic moiety.
  misc_feature (21)..(21): 3'-3 attached inverted deoxyabasic moiety.
ccgugagaguuccaacuuutt

SEQ ID NO: 3286 - DNA, 21 bp, Artificial Sequence
  Synthetic
  misc_feature (1)..(1): 5'-3 attached inverted deoxyabasic moiety.
  misc_feature (21)..(21): 3'-3 attached inverted deoxyabasic moiety.
gcuacgagcaggguagguutt

SEQ ID NO: 3287 - DNA, 21 bp, Artificial Sequence
  Synthetic
  misc_feature (1)..(1): 5'-3 attached inverted deoxyabasic moiety.
  misc_feature (21)..(21): 3'-3 attached inverted deoxyabasic moiety.
cagacaccuacgacucagutt

SEQ ID NO: 3288 - DNA, 21 bp, Artificial Sequence
  Synthetic
  misc_feature (1)..(1): 5'-3 attached inverted deoxyabasic moiety.
  misc_feature (21)..(21): 3'-3 attached inverted deoxyabasic moiety.
gcggaugaccacacgagaatt

SEQ ID NO: 3289 - DNA, 21 bp, Artificial Sequence
  Synthetic
  misc_feature (20)..(21): phosphorothioate linkage
uacgauaaggacccuccggtt

SEQ ID NO: 3290 - DNA, 21 bp, Artificial Sequence
  Synthetic
  misc_feature (20)..(21): phosphorothioate linkage
auuaaucgucgcaguucuctt

SEQ ID NO: 3291 - DNA, 21 bp, Artificial Sequence
  Synthetic
  misc_feature (20)..(21): phosphorothioate linkage
uauuucgcuucgaagugactt

SEQ ID NO: 3292 - DNA, 21 bp, Artificial Sequence
  Synthetic
  misc_feature (20)..(21): phosphorothioate linkage
uauuuuggucauagaccagtt

SEQ ID NO: 3293 - DNA, 21 bp, Artificial Sequence
  Synthetic
  misc_feature (20)..(21): phosphorothioate linkage
aaaguuggaacucucacggtt

SEQ ID NO: 3294 - DNA, 21 bp, Artificial Sequence
  Synthetic
  misc_feature (20)..(21): phosphorothioate linkage
aaccuacccugcucguagctt

SEQ ID NO: 3295 - DNA, 21 bp, Artificial Sequence
  Synthetic
  misc_feature (20)..(21): phosphorothioate linkage
acugagucguaggugucugtt

SEQ ID NO: 3296 - DNA, 21 bp, Artificial Sequence
  Synthetic
  misc_feature (20)..(21): phosphorothioate linkage
uucucguguggucauccgctt

SEQ ID NO: 3297 - DNA, 21 bp, Artificial Sequence
  Synthetic
  misc_feature (1)..(1): 2'-deoxy-2'-fluoro
  misc_feature (2)..(2): 2'-O-methyl
  misc_feature (3)..(3): 2'-deoxy-2'-fluoro
  misc_feature (4)..(5): 2'-O-methyl
  misc_feature (6)..(6): 2'-deoxy-2'-fluoro
  misc_feature (7)..(11): 2'-O-methyl
  misc_feature (12)..(17): 2'-deoxy-2'-fluoro
  misc_feature (18)..(19): 2'-O-methyl
  misc_feature (21)..(21): 3'-3 attached inverted deoxyabasic moiety.
uacgauaaggacccuccggtt

SEQ ID NO: 3298 - DNA, 21 bp, Artificial Sequence
  Synthetic
  misc_feature (1)..(1): 2'-O-methyl
  misc_feature (2)..(3): 2'-deoxy-2'-fluoro
  misc_feature (4)..(5): 2'-O-methyl
  misc_feature (6)..(7): 2'-deoxy-2'-fluoro
  misc_feature (8)..(8): 2'-O-methyl
  misc_feature (9)..(10): 2'-deoxy-2'-fluoro
  misc_feature (11)..(11): 2'-O-methyl
  misc_feature (12)..(12): 2'-deoxy-2'-fluoro
  misc_feature (13)..(14): 2'-O-methyl
  misc_feature (15)..(19): 2'-deoxy-2'-fluoro
  misc_feature (21)..(21): 3'-3 attached inverted deoxyabasic moiety.
auuaaucgucgcaguucuctt

SEQ ID NO: 3299 - DNA, 21 bp, Artificial Sequence
  Synthetic
  misc_feature (1)..(1): 2'-deoxy-2'-fluoro
  misc_feature (2)..(2): 2'-O-methyl
  misc_feature (3)..(6): 2'-deoxy-2'-fluoro
  misc_feature (7)..(7): 2'-O-methyl
  misc_feature (8)..(11): 2'-deoxy-2'-fluoro
  misc_feature (12)..(15): 2'-O-methyl
  misc_feature (16)..(16): 2'-deoxy-2'-fluoro
  misc_feature (17)..(18): 2'-O-methyl
  misc_feature (21)..(21): 3'-3 attached inverted deoxyabasic moiety.
uauuucgcuucgaagugactt

SEQ ID NO: 3300 - DNA, 21 bp, Artificial Sequence
  Synthetic
  misc_feature (1)..(1): 2'-deoxy-2'-fluoro
  misc_feature (2)..(2): 2'-O-methyl
  misc_feature (3)..(6): 2'-deoxy-2'-fluoro
  misc_feature (7)..(8): 2'-O-methyl
  misc_feature (9)..(10): 2'-deoxy-2'-fluoro
  misc_feature (11)..(11): 2'-O-methyl
  misc_feature (12)..(12): 2'-deoxy-2'-fluoro
  misc_feature (13)..(15): 2'-O-methyl
  misc_feature (16)..(17): 2'-deoxy-2'-fluoro
  misc_feature (18)..(19): 2'-O-methyl
  misc_feature (21)..(21): 3'-3 attached inverted deoxyabasic moiety.
uauuuuggucauagaccagtt

SEQ ID NO: 3301 - DNA, 21 bp, Artificial Sequence
  Synthetic
  misc_feature (1)..(4): 2'-O-methyl
  misc_feature (5)..(6): 2'-deoxy-2'-fluoro
  misc_feature (7)..(10): 2'-O-methyl
  misc_feature (11)..(15): 2'-deoxy-2'-fluoro
  misc_feature (16)..(16): 2'-O-methyl
  misc_feature (17)..(17): 2'-deoxy-2'-fluoro
  misc_feature (18)..(19): 2'-O-methyl
  misc_feature (21)..(21): 3'-3 attached inverted deoxyabasic moiety.
aaaguuggaacucucacggtt

SEQ ID NO: 3302 - DNA, 21 bp, Artificial Sequence
  Synthetic
  misc_feature (1)..(2): 2'-O-methyl
  misc_feature (3)..(5): 2'-deoxy-2'-fluoro
  misc_feature (6)..(6): 2'-O-methyl
  misc_feature (7)..(10): 2'-deoxy-2'-fluoro
  misc_feature (11)..(11): 2'-O-methyl
  misc_feature (12)..(14): 2'-deoxy-2'-fluoro
  misc_feature (15)..(15): 2'-O-methyl
  misc_feature (16)..(16): 2'-deoxy-2'-fluoro
  misc_feature (17)..(18): 2'-O-methyl
  misc_feature (19)..(19): 2'-deoxy-2'-fluoro
  misc_feature (21)..(21): 3'-3 attached inverted deoxyabasic moiety.
aaccuacccugcucguagctt

SEQ ID NO: 3303 - DNA, 21 bp, Artificial Sequence
  Synthetic
  misc_feature (1)..(1): 2'-O-methyl
  misc_feature (2)..(3): 2'-deoxy-2'-fluoro
  misc_feature (4)..(6): 2'-O-methyl
  misc_feature (7)..(8): 2'-deoxy-2'-fluoro
  misc_feature (9)..(9): 2'-O-methyl
  misc_feature (10)..(10): 2'-deoxy-2'-fluoro
  misc_feature (11)..(13): 2'-O-methyl
  misc_feature (14)..(14): 2'-deoxy-2'-fluoro
  misc_feature (15)..(15): 2'-O-methyl
  misc_feature (16)..(18): 2'-deoxy-2'-fluoro
  misc_feature (19)..(19): 2'-O-methyl
  misc_feature (21)..(21): 3'-3 attached inverted deoxyabasic moiety.
acugagucguaggugucugtt

SEQ ID NO: 3304 - DNA, 21 bp, Artificial Sequence
  Synthetic
  misc_feature (1)..(5): 2'-deoxy-2'-fluoro
  misc_feature (6)..(6): 2'-O-methyl
  misc_feature (7)..(7): 2'-deoxy-2'-fluoro
  misc_feature (8)..(8): 2'-O-methyl
  misc_feature (9)..(9): 2'-deoxy-2'-fluoro
  misc_feature (10)..(11): 2'-O-methyl
  misc_feature (12)..(13): 2'-deoxy-2'-fluoro
  misc_feature (14)..(14): 2'-O-methyl
  misc_feature (15)..(17): 2'-deoxy-2'-fluoro
  misc_feature (18)..(18): 2'-O-methyl
  misc_feature (19)..(19): 2'-deoxy-2'-fluoro
  misc_feature (21)..(21): 3'-3 attached inverted deoxyabasic moiety.
uucucguguggucauccgctt

SEQ ID NO: 3305 - DNA, 21 bp, Artificial Sequence
  Synthetic
  misc_feature (21)..(21): 3'-3 attached inverted deoxyabasic moiety.
uacgauaaggacccuccggtt

SEQ ID NO: 3306 - DNA, 21 bp, Artificial Sequence
  Synthetic
  misc_feature (21)..(21): 3'-3 attached inverted deoxyabasic moiety.
auuaaucgucgcaguucuctt

SEQ ID NO: 3307 - DNA, 21 bp, Artificial Sequence
  Synthetic
  misc_feature (21)..(21): 3'-3 attached inverted deoxyabasic moiety.
uauuucgcuucgaagugactt

SEQ ID NO: 3308 - DNA, 21 bp, Artificial Sequence
  Synthetic
  misc_feature (21)..(21): 3'-3 attached inverted deoxyabasic moiety.
uauuuuggucauagaccagtt

SEQ ID NO: 3309 - DNA, 21 bp, Artificial Sequence
  Synthetic
  misc_feature (21)..(21): 3'-3 attached inverted deoxyabasic moiety.
aaaguuggaacucucacggtt

SEQ ID NO: 3310 - DNA, 21 bp, Artificial Sequence
  Synthetic
  misc_feature (21)..(21): 3'-3 attached inverted deoxyabasic moiety.
aaccuacccugcucguagctt

SEQ ID NO: 3311 - DNA, 21 bp, Artificial Sequence
  Synthetic
  misc_feature (21)..(21): 3'-3 attached inverted deoxyabasic moiety.
acugagucguaggugucugtt

SEQ ID NO: 3312 - DNA, 21 bp, Artificial Sequence
  Synthetic
  misc_feature (21)..(21): 3'-3 attached inverted deoxyabasic moiety.
uucucguguggucauccgctt

SEQ ID NO: 3313 - DNA, 21 bp, Artificial Sequence
  Synthetic
  misc_feature (4)..(5): 2'-O-methyl
  misc_feature (6)..(6): 2'-deoxy-2'-fluoro
  misc_feature (7)..(11): 2'-O-methyl
  misc_feature (12)..(17): 2'-deoxy-2'-fluoro
  misc_feature (18)..(19): 2'-O-methyl
  misc_feature (20)..(21): phosphorothioate linkage
uacgauaaggacccuccggtt

SEQ ID NO: 3314 - DNA, 21 bp, Artificial Sequence
  Synthetic
  misc_feature (4)..(5): 2'-O-methyl
  misc_feature (6)..(7): 2'-deoxy-2'-fluoro
  misc_feature (8)..(8): 2'-O-methyl
  misc_feature (9)..(10): 2'-deoxy-2'-fluoro
  misc_feature (11)..(11): 2'-O-methyl
  misc_feature (12)..(12): 2'-deoxy-2'-fluoro
  misc_feature (13)..(14): 2'-O-methyl
  misc_feature (15)..(19): 2'-deoxy-2'-fluoro
  misc_feature (20)..(21): phosphorothioate linkage
auuaaucgucgcaguucuctt

SEQ ID NO: 3315 - DNA, 21 bp, Artificial Sequence
  Synthetic
  misc_feature (4)..(6): 2'-deoxy-2'-fluoro
  misc_feature (7)..(7): 2'-O-methyl
  misc_feature (8)..(11): 2'-deoxy-2'-fluoro
  misc_feature (12)..(15): 2'-O-methyl
  misc_feature (16)..(16): 2'-deoxy-2'-fluoro
  misc_feature (17)..(18): 2'-O-methyl
  misc_feature (19)..(19): 2'-deoxy-2'-fluoro
  misc_feature (20)..(21): phosphorothioate linkage
uauuucgcuucgaagugactt

SEQ ID NO: 3316 - DNA, 21 bp, Artificial Sequence
  Synthetic
  misc_feature (4)..(6): 2'-deoxy-2'-fluoro
  misc_feature (7)..(8): 2'-O-methyl
  misc_feature (9)..(10): 2'-deoxy-2'-fluoro
  misc_feature (11)..(11): 2'-O-methyl
  misc_feature (12)..(12): 2'-deoxy-2'-fluoro
  misc_feature (13)..(15): 2'-O-methyl
  misc_feature (16)..(17): 2'-deoxy-2'-fluoro
  misc_feature (18)..(19): 2'-O-methyl
  misc_feature (20)..(21): phosphorothioate linkage
uauuuuggucauagaccagtt

SEQ ID NO: 3317 - DNA, 21 bp, Artificial Sequence
  Synthetic
  misc_feature (4)..(4): 2'-O-methyl
  misc_feature (5)..(6): 2'-deoxy-2'-fluoro
  misc_feature (7)..(10): 2'-O-methyl
  misc_feature (11)..(15): 2'-deoxy-2'-fluoro
  misc_feature (16)..(16): 2'-O-methyl
  misc_feature (17)..(17): 2'-deoxy-2'-fluoro
  misc_feature (18)..(19): 2'-O-methyl
  misc_feature (20)..(21): phosphorothioate linkage
aaaguuggaacucucacggtt

SEQ ID NO: 3318 - DNA, 21 bp, Artificial Sequence
  Synthetic
  misc_feature (4)..(5): 2'-deoxy-2'-fluoro
  misc_feature (6)..(6): 2'-O-methyl
  misc_feature (7)..(10): 2'-deoxy-2'-fluoro
  misc_feature (11)..(11): 2'-O-methyl
  misc_feature (12)..(14): 2'-deoxy-2'-fluoro
  misc_feature (15)..(15): 2'-O-methyl
  misc_feature (16)..(16): 2'-deoxy-2'-fluoro
  misc_feature (17)..(18): 2'-O-methyl
  misc_feature (19)..(19): 2'-deoxy-2'-fluoro
  misc_feature (20)..(21): phosphorothioate linkage
aaccuacccugcucguagctt

SEQ ID NO: 3319 - DNA, 21 bp, Artificial Sequence
  Synthetic
  misc_feature (7)..(8): 2'-deoxy-2'-fluoro
  misc_feature (10)..(10): 2'-deoxy-2'-fluoro
  misc_feature (14)..(14): 2'-deoxy-2'-fluoro
  misc_feature (16)..(18): 2'-deoxy-2'-fluoro
  misc_feature (20)..(21): phosphorothioate linkage
acugagucguaggugucugtt

SEQ ID NO: 3320 - DNA, 21 bp, Artificial Sequence
  Synthetic
  misc_feature (4)..(5): 2'-deoxy-2'-fluoro
  misc_feature (6)..(6): 2'-O-methyl
  misc_feature (7)..(7): 2'-deoxy-2'-fluoro
  misc_feature (8)..(8): 2'-O-methyl
  misc_feature (9)..(9): 2'-deoxy-2'-fluoro
  misc_feature (10)..(11): 2'-O-methyl
  misc_feature (12)..(13): 2'-deoxy-2'-fluoro
  misc_feature (14)..(14): 2'-O-methyl
  misc_feature (15)..(17): 2'-deoxy-2'-fluoro
  misc_feature (18)..(18): 2'-O-methyl
  misc_feature (19)..(19): 2'-deoxy-2'-fluoro
  misc_feature (20)..(21): phosphorothioate linkage
uucucguguggucauccgctt

SEQ ID NO: 3321 - RNA, 19 nt, Artificial Sequence
  Synthetic
aauaccuaccuugcaggac

SEQ ID NO: 3322 - RNA, 19 nt, Artificial Sequence
  Synthetic
ccacgacaggauuaaguga

SEQ ID NO: 3323 - RNA, 19 nt, Artificial Sequence
  Synthetic
aggaaaaacccccaugaga

SEQ ID NO: 3324 - RNA, 19 nt, Artificial Sequence
  Synthetic
aguguuuugccauugucaa

SEQ ID NO: 3325 - RNA, 19 nt, Artificial Sequence
  Synthetic
agugagccugagggaggcu

SEQ ID NO: 3326 - RNA, 19 nt, Artificial Sequence
  Synthetic
ugaggggggaucaggcugu

SEQ ID NO: 3327 - RNA, 19 nt, Artificial Sequence
  Synthetic
uaucaugcccccgaggaca

SEQ ID NO: 3328 - RNA, 19 nt, Artificial Sequence
  Synthetic
aaacuuuccaguuuacccu

SEQ ID NO: 3329 - RNA, 19 nt, Artificial Sequence
  Synthetic
ugcucccucucucuguccc

SEQ ID NO: 3330 - RNA, 19 nt, Artificial Sequence
  Synthetic
cuaggcugccccaggcccu

SEQ ID NO: 3331 - RNA, 19 nt, Artificial Sequence
  Synthetic
ugugcagacacaccaggcc

SEQ ID NO: 3332 - RNA, 19 nt, Artificial Sequence
  Synthetic
ccucagccgcagcccaugg

SEQ ID NO: 3333 - RNA, 19 nt, Artificial Sequence
  Synthetic
gaccugcgggugggccagc

SEQ ID NO: 3334 - RNA, 19 nt, Artificial Sequence
  Synthetic
cggcccccaguggagcccc

SEQ ID NO: 3335 - RNA, 19 nt, Artificial Sequence
  Synthetic
ccaccagagcccacauugc

SEQ ID NO: 3336 - RNA, 19 nt, Artificial Sequence
  Synthetic
cuggcccugcagcgucccc

SEQ ID NO: 3337 - RNA, 19 nt, Artificial Sequence
  Synthetic
cagcgccugcaccaccacc

SEQ ID NO: 3338 - RNA, 19 nt, Artificial Sequence
  Synthetic
cucuuccuagcaggccugc

SEQ ID NO: 3339 - RNA, 19 nt, Artificial Sequence
  Synthetic
cagcagcagcgcucggugg

SEQ ID NO: 3340 - RNA, 19 nt, Artificial Sequence
  Synthetic
gagcccaugaggcucucca

SEQ ID NO: 3341 - RNA, 19 nt, Artificial Sequence
  Synthetic
auggacacgccgaugcccg

SEQ ID NO: 3342 - RNA, 19 nt, Artificial Sequence
  Synthetic
gaguugcaggugggacccc

SEQ ID NO: 3343 - RNA, 19 nt, Artificial Sequence
  Synthetic
caggaacaagagcugcggc

SEQ ID NO: 3344 - RNA, 19 nt, Artificial Sequence
  Synthetic
cagcuucuccacaaggaca

SEQ ID NO: 3345 - RNA, 19 nt, Artificial Sequence
  Synthetic
aagagcaagcgaagugcug

SEQ ID NO: 3346 - RNA, 19 nt, Artificial Sequence
  Synthetic
guagccagcagcgugguca

SEQ ID NO: 3347 - RNA, 19 nt, Artificial Sequence
  Synthetic
aagcagaagcuagcggagg

SEQ ID NO: 3348 - RNA, 19 nt, Artificial Sequence
  Synthetic
gugauucugaaaaaacagc

SEQ ID NO: 3349 - RNA, 19 nt, Artificial Sequence
  Synthetic
caggcggcccuagaaagaa

SEQ ID NO: 3350 - RNA, 19 nt, Artificial Sequence
  Synthetic
acaguccaucccaacagcc

SEQ ID NO: 3351 - RNA, 19 nt, Artificial Sequence
  Synthetic
cccggcauucccuacagaa

SEQ ID NO: 3352 - RNA, 19 nt, Artificial Sequence
  Synthetic
acccuggagccccuggaga

SEQ ID NO: 3353 - RNA, 19 nt, Artificial Sequence
  Synthetic
acggaaggagccacccgcu

SEQ ID NO: 3354 - RNA, 19 nt, Artificial Sequence
  Synthetic
uccaugcucagcagcuuuu

SEQ ID NO: 3355 - RNA, 19 nt, Artificial Sequence
  Synthetic
uugccuccuguucccagcc

SEQ ID NO: 3356 - RNA, 19 nt, Artificial Sequence
  Synthetic
cugcccagugaccccccag

SEQ ID NO: 3357 - RNA, 19 nt, Artificial Sequence
  Synthetic
gagcacuucccucugcgca

SEQ ID NO: 3358 - RNA, 19 nt, Artificial Sequence
  Synthetic
aagacagucucugagccca

SEQ ID NO: 3359 - RNA, 19 nt, Artificial Sequence
  Synthetic
aaccugaagcugcgcuaua

SEQ ID NO: 3360 - RNA, 19 nt, Artificial Sequence
  Synthetic
aagcccaagaagucccugg

SEQ ID NO: 3361 - RNA, 19 nt, Artificial Sequence
  Synthetic
gagcggaggaagaauccac

SEQ ID NO: 3362 - RNA, 19 nt, Artificial Sequence
  Synthetic
cugcuccgaaaggagagug

SEQ ID NO: 3363 - RNA, 19 nt, Artificial Sequence
  Synthetic
gcgccccccagccuccggc

SEQ ID NO: 3364 - RNA, 19 nt, Artificial Sequence
  Synthetic
cggcggcccgcagagaccc

SEQ ID NO: 3365 - RNA, 19 nt, Artificial Sequence
  Synthetic
cucggagacuccuccccaa

SEQ ID NO: 3366 - RNA, 19 nt, Artificial Sequence
  Synthetic
aguaguagcagcacgcccg

SEQ ID NO: 3367 - RNA, 19 nt, Artificial Sequence
  Synthetic
gcaucagggugcagcuccc

SEQ ID NO: 3368 - RNA, 19 nt, Artificial Sequence
  Synthetic
cccaaugacagcgagcacg

SEQ ID NO: 3369 - RNA, 19 nt, Artificial Sequence
  Synthetic
ggccccaaucccauccugg

SEQ ID NO: 3370 - RNA, 19 nt, Artificial Sequence
  Synthetic
ggcgacagugaccgcagga

SEQ ID NO: 3371 - RNA, 19 nt, Artificial Sequence
  Synthetic
acccauccgacucugggcc

SEQ ID NO: 3372 - RNA, 19 nt, Artificial Sequence
  Synthetic
ccucgggggccaauccugg

SEQ ID NO: 3373 - RNA, 19 nt, Artificial Sequence
  Synthetic
gggagcccccacacucccc

SEQ ID NO: 3374 - RNA, 19 nt, Artificial Sequence
  Synthetic
cucuuccugccccauggcu

SEQ ID NO: 3375 - RNA, 19 nt, Artificial Sequence
  Synthetic
uuggagcccgaggcugggg

SEQ ID NO: 3376 - RNA, 19 nt, Artificial Sequence
  Synthetic
ggcaccuugcccucucgcc

SEQ ID NO: 3377 - RNA, 19 nt, Artificial Sequence
  Synthetic
cugcagcccauucuccucc

SEQ ID NO: 3378 - RNA, 19 nt, Artificial Sequence
  Synthetic
cuggaccccucaggcucuc

SEQ ID NO: 3379 - RNA, 19 nt, Artificial Sequence
  Synthetic
caugccccgcugcugacug

SEQ ID NO: 3380 - RNA, 19 nt, Artificial Sequence
  Synthetic
gugcccgggcuugggcccu

SEQ ID NO: 3381 - RNA, 19 nt, Artificial Sequence
  Synthetic
uugcccuuccacuuugccc

SEQ ID NO: 3382 - RNA, 19 nt, Artificial Sequence
  Synthetic
caguccuuaaugaccaccg

SEQ ID NO: 3383 - RNA, 19 nt, Artificial Sequence
  Synthetic
gagcggcucucugggucag

SEQ ID NO: 3384 - RNA, 19 nt, Artificial Sequence
  Synthetic
ggccuccacuggccacuga

SEQ ID NO: 3385 - RNA, 19 nt, Artificial Sequence
  Synthetic
agccggacucgcucagagc

SEQ ID NO: 3386 - RNA, 19 nt, Artificial Sequence
  Synthetic
ccccugccccccagugcca

SEQ ID NO: 3387 - RNA, 19 nt, Artificial Sequence
  Synthetic
accgcucccccaccgccgg

SEQ ID NO: 3388 - RNA, 19 nt, Artificial Sequence
  Synthetic
ggccccaugcagccccgcc

SEQ ID NO: 3389 - RNA, 19 nt, Artificial Sequence
  Synthetic
cuggagcagcucaaaacuc

SEQ ID NO: 3390 - RNA, 19 nt, Artificial Sequence
  Synthetic
cacguccaggugaucaaga

SEQ ID NO: 3391 - RNA, 19 nt, Artificial Sequence
  Synthetic
aggucagccaagccgagug

SEQ ID NO: 3392 - RNA, 19 nt, Artificial Sequence
  Synthetic
gagaagccccggcugcggc

SEQ ID NO: 3393 - RNA, 19 nt, Artificial Sequence
  Synthetic
cagauacccucggcugaag

SEQ ID NO: 3394 - RNA, 19 nt, Artificial Sequence
  Synthetic
gaccuggagacagauggcg

SEQ ID NO: 3395 - RNA, 19 nt, Artificial Sequence
  Synthetic
gggggaccgggccaggugg

SEQ ID NO: 3396 - RNA, 19 nt, Artificial Sequence
  Synthetic
guggacgauggccuggagc

SEQ ID NO: 3397 - RNA, 19 nt, Artificial Sequence
  Synthetic
cacagggagcugggccaug

SEQ ID NO: 3398 - RNA, 19 nt, Artificial Sequence
  Synthetic
gggcagccugaggccagag

SEQ ID NO: 3399 - RNA, 19 nt, Artificial Sequence
  Synthetic
ggccccgcuccucuccagc

SEQ ID NO: 3400 - RNA, 19 nt, Artificial Sequence
  Synthetic
cagcacccucagguguugc

SEQ ID NO: 3401 - RNA, 19 nt, Artificial Sequence
  Synthetic
cucugggaacagcagcgac

SEQ ID NO: 3402 - RNA, 19 nt, Artificial Sequence
  Synthetic
cuggcugggcggcuccccc

SEQ ID NO: 3403 - RNA, 19 nt, Artificial Sequence
  Synthetic
cggggcagcaccggggaca

SEQ ID NO: 3404 - RNA, 19 nt, Artificial Sequence
  Synthetic
acugugcugcuuccucugg

SEQ ID NO: 3405 - RNA, 19 nt, Artificial Sequence
  Synthetic
gcccagggugggcaccggc

SEQ ID NO: 3406 - RNA, 19 nt, Artificial Sequence
  Synthetic
ccucugucccgggcucagu

SEQ ID NO: 3407 - RNA, 19 nt, Artificial Sequence
  Synthetic
ucuuccccagccgcaccug

SEQ ID NO: 3408 - RNA, 19 nt, Artificial Sequence
  Synthetic
gccucacugucagccccag

SEQ ID NO: 3409 - RNA, 19 nt, Artificial Sequence
  Synthetic
gagccugccagccaggccc

SEQ ID NO: 3410 - RNA, 19 nt, Artificial Sequence
  Synthetic
cgaguccucuccagcucag

SEQ ID NO: 3411 - RNA, 19 nt, Artificial Sequence
  Synthetic
gagaccccugccaggaccc

SEQ ID NO: 3412 - RNA, 19 nt, Artificial Sequence
  Synthetic
cugcccuucaccacagggc

SEQ ID NO: 3413 - RNA, 19 nt, Artificial Sequence
  Synthetic
cugaucuaugacucgguca

SEQ ID NO: 3414 - RNA, 19 nt, Artificial Sequence
  Synthetic
augcugaagcaccagugcu

SEQ ID NO: 3415 - RNA, 19 nt, Artificial Sequence
  Synthetic
uccugcggugacaacagca

SEQ ID NO: 3416 - RNA, 19 nt, Artificial Sequence
  Synthetic
aggcacccggagcacgccg

SEQ ID NO: 3417 - RNA, 19 nt, Artificial Sequence
  Synthetic
ggccgcauccagagcaucu

SEQ ID NO: 3418 - RNA, 19 nt, Artificial Sequence
  Synthetic
uggucccggcugcaggagc

SEQ ID NO: 3419 - RNA, 19 nt, Artificial Sequence
  Synthetic
cgggggcuccggagccagu

SEQ ID NO: 3420 - RNA, 19 nt, Artificial Sequence
  Synthetic
ugugagugucuccgaggcc

SEQ ID NO: 3421 - RNA, 19 nt, Artificial Sequence
  Synthetic
cggaaggccucccuggaag

SEQ ID NO: 3422 - RNA, 19 nt, Artificial Sequence
  Synthetic
gagcugcagucgguccacu

SEQ ID NO: 3423 - RNA, 19 nt, Artificial Sequence
  Synthetic
ucugagcggcacgugcucc

SEQ ID NO: 3424 - RNA, 19 nt, Artificial Sequence
  Synthetic
cucuacggcaccaacccgc

SEQ ID NO: 3425 - RNA, 19 nt, Artificial Sequence
  Synthetic
cucagccgccucaaacugg

SEQ ID NO: 3426 - RNA, 19 nt, Artificial Sequence
  Synthetic
gacaacgggaagcuggcag

SEQ ID NO: 3427 - RNA, 19 nt, Artificial Sequence
  Synthetic
gggcuccuggcacagcgga

SEQ ID NO: 3428 - RNA, 19 nt, Artificial Sequence
  Synthetic
auguuugagaugcugcccu

SEQ ID NO: 3429 - RNA, 19 nt, Artificial Sequence
  Synthetic
uguggugggguuggggugg

SEQ ID NO: 3430 - RNA, 19 nt, Artificial Sequence
  Synthetic
gacacugacaccaucugga

SEQ ID NO: 3431 - RNA, 19 nt, Artificial Sequence
  Synthetic
aaugagcuucauuccucca

SEQ ID NO: 3432 - RNA, 19 nt, Artificial Sequence
  Synthetic
aaugcagcccgcugggccg

SEQ ID NO: 3433 - RNA, 19 nt, Artificial Sequence
  Synthetic
gcuggcagugucacugacc

SEQ ID NO: 3434 - RNA, 19 nt, Artificial Sequence
  Synthetic
cucgccuucaaaguggcuu

SEQ ID NO: 3435 - RNA, 19 nt, Artificial Sequence
  Synthetic
ucucgugagcuaaagaaug

SEQ ID NO: 3436 - RNA, 19 nt, Artificial Sequence
  Synthetic
gguuucgcuguggugcggc

SEQ ID NO: 3437 - RNA, 19 nt, Artificial Sequence
  Synthetic
cccccaggacaccaugcag

SEQ ID NO: 3438 - RNA, 19 nt, Artificial Sequence
  Synthetic
gaucauucaacagccaugg

SEQ ID NO: 3439 - RNA, 19 nt, Artificial Sequence
  Synthetic
ggcuucugcuucuucaacu

SEQ ID NO: 3440 - RNA, 19 nt, Artificial Sequence
  Synthetic
ucaguggccaucgccugcc

SEQ ID NO: 3441 - RNA, 19 nt, Artificial Sequence
  Synthetic
cggcagcugcaacagcaga

SEQ ID NO: 3442 - RNA, 19 nt, Artificial Sequence
  Synthetic
agcaaggccagcaaggcca

SEQ ID NO: 3443 - RNA, 19 nt, Artificial Sequence
  Synthetic
agcaagauccucauuguag

SEQ ID NO: 3444 - RNA, 19 nt, Artificial Sequence
  Synthetic
gacugggacgugcaccaug

SEQ ID NO: 3445 - RNA, 19 nt, Artificial Sequence
  Synthetic
ggcaacggcacccagcaaa

SEQ ID NO: 3446 - RNA, 19 nt, Artificial Sequence
  Synthetic
accuucuaccaagacccca

SEQ ID NO: 3447 - RNA, 19 nt, Artificial Sequence
  Synthetic
agugugcucuacaucuccc

SEQ ID NO: 3448 - RNA, 19 nt, Artificial Sequence
  Synthetic
cugcaucgccaugacgacg

SEQ ID NO: 3449 - RNA, 19 nt, Artificial Sequence
  Synthetic
ggcaacuucuucccgggga

SEQ ID NO: 3450 - RNA, 19 nt, Artificial Sequence
  Synthetic
aguggggcuguggaugagg

SEQ ID NO: 3451 - RNA, 19 nt, Artificial Sequence
  Synthetic
guaggggcuggcagcggug

SEQ ID NO: 3452 - RNA, 19 nt, Artificial Sequence
  Synthetic
gagggcuucaaugucaaug

SEQ ID NO: 3453 - RNA, 19 nt, Artificial Sequence
  Synthetic
guggccugggcuggagguc

SEQ ID NO: 3454 - RNA, 19 nt, Artificial Sequence
  Synthetic
cuggacccccccauggggg

SEQ ID NO: 3455 - RNA, 19 nt, Artificial Sequence
  Synthetic
gauccugaguaccuggcug

SEQ ID NO: 3456 - RNA, 19 nt, Artificial Sequence
  Synthetic
gcuuucaggauagucguga

SEQ ID NO: 3457 - RNA, 19 nt, Artificial Sequence
  Synthetic
augcccaucgcccgagagu

SEQ ID NO: 3458 - RNA, 19 nt, Artificial Sequence
  Synthetic
uucucuccagaccuagucc

SEQ ID NO: 3459 - RNA, 19 nt, Artificial Sequence
  Synthetic
cuggugucugcuggauuug

SEQ ID NO: 3460 - RNA, 19 nt, Artificial Sequence
  Synthetic
gaugcugcugagggucacc

SEQ ID NO: 3461 - RNA, 19 nt, Artificial Sequence
  Synthetic
ccggccccacuggguggcu

SEQ ID NO: 3462 - RNA, 19 nt, Artificial Sequence
  Synthetic
uaccauguuucugccaaau

SEQ ID NO: 3463 - RNA, 19 nt, Artificial Sequence
  Synthetic
uguuuuggauacaugacgc

SEQ ID NO: 3464 - RNA, 19 nt, Artificial Sequence
  Synthetic
cagcaacugaugaaccugg

SEQ ID NO: 3465 - RNA, 19 nt, Artificial Sequence
  Synthetic
gcaggaggcgcaguggugc

SEQ ID NO: 3466 - RNA, 19 nt, Artificial Sequence
  Synthetic
cuggccuuggaggguggcc

SEQ ID NO: 3467 - RNA, 19 nt, Artificial Sequence
  Synthetic
caugaccucacagccaucu

SEQ ID NO: 3468 - RNA, 19 nt, Artificial Sequence
  Synthetic
ugugacgccucugaggccu

SEQ ID NO: 3469 - RNA, 19 nt, Artificial Sequence
  Synthetic
uguguggcugcucuucugg

SEQ ID NO: 3470 - RNA, 19 nt, Artificial Sequence
  Synthetic
gguaacaggguggaucccc

SEQ ID NO: 3471 - RNA, 19 nt, Artificial Sequence
  Synthetic
cuuucagaagaaggcugga

SEQ ID NO: 3472 - RNA, 19 nt, Artificial Sequence
  Synthetic
aaacagaaaccccaaccuc

SEQ ID NO: 3473 - RNA, 19 nt, Artificial Sequence
  Synthetic
caaugccauccgcucucug

SEQ ID NO: 3474 - RNA, 19 nt, Artificial Sequence
  Synthetic
ggaggccgugauccgggug

SEQ ID NO: 3475 - RNA, 19 nt, Artificial Sequence
  Synthetic
gcacaguaaauacuggggc

SEQ ID NO: 3476 - RNA, 19 nt, Artificial Sequence
  Synthetic
cugcaugcagcgccuggcc

SEQ ID NO: 3477 - RNA, 19 nt, Artificial Sequence
  Synthetic
cuccuguccagacuccugg

SEQ ID NO: 3478 - RNA, 19 nt, Artificial Sequence
  Synthetic
ggugccuagagugccaggg

SEQ ID NO: 3479 - RNA, 19 nt, Artificial Sequence
  Synthetic
ggcugacaaagaagaagug

SEQ ID NO: 3480 - RNA, 19 nt, Artificial Sequence
  Synthetic
ggaggcagugaccgcacug

SEQ ID NO: 3481 - RNA, 19 nt, Artificial Sequence
  Synthetic
ggcgucccucucugugggc

SEQ ID NO: 3482 - RNA, 19 nt, Artificial Sequence
  Synthetic
cauccuggcugaagauagg

SEQ ID NO: 3483 - RNA, 19 nt, Artificial Sequence
  Synthetic
gcccucggagcagcuggug

SEQ ID NO: 3484 - RNA, 19 nt, Artificial Sequence
  Synthetic
ggaggaggaagaaccuaug

SEQ ID NO: 3485 - RNA, 19 nt, Artificial Sequence
  Synthetic
gaaucucuaaggcucugga

SEQ ID NO: 3486 - RNA, 19 nt, Artificial Sequence
  Synthetic
aaccaucugcccgcccacc

SEQ ID NO: 3487 - RNA, 19 nt, Artificial Sequence
  Synthetic
caugcccuugggaccuggu

SEQ ID NO: 3488 - RNA, 19 nt, Artificial Sequence
  Synthetic
uucucuucuaaccccuggc

SEQ ID NO: 3489 - RNA, 19 nt, Artificial Sequence
  Synthetic
caauagcccccauuccugg

SEQ ID NO: 3490 - RNA, 19 nt, Artificial Sequence
  Synthetic
ggucuuuagagauccugug

SEQ ID NO: 3491 - RNA, 19 nt, Artificial Sequence
  Synthetic
gggcaaguaguuggaacca

SEQ ID NO: 3492 - RNA, 19 nt, Artificial Sequence
  Synthetic
agagaacagccugccugcu

SEQ ID NO: 3493 - RNA, 19 nt, Artificial Sequence
  Synthetic
uuugacaguuaucccaggg

SEQ ID NO: 3494 - RNA, 19 nt, Artificial Sequence
  Synthetic
guccugcaagguagguauu

SEQ ID NO: 3495 - RNA, 19 nt, Artificial Sequence
  Synthetic
ucacuuaauccugucgugg

SEQ ID NO: 3496 - RNA, 19 nt, Artificial Sequence
  Synthetic
ucucauggggguuuuuccu

SEQ ID NO: 3497 - RNA, 19 nt, Artificial Sequence
  Synthetic
uugacaauggcaaaacacu

SEQ ID NO: 3498 - RNA, 19 nt, Artificial Sequence
  Synthetic
agccucccucaggcucacu

SEQ ID NO: 3499 - RNA, 19 nt, Artificial Sequence
  Synthetic
acagccugauccccccuca

SEQ ID NO: 3500 - RNA, 19 nt, Artificial Sequence
  Synthetic
uguccucgggggcaugaua

SEQ ID NO: 3501 - RNA, 19 nt, Artificial Sequence
  Synthetic
aggguaaacuggaaaguuu

SEQ ID NO: 3502 - RNA, 19 nt, Artificial Sequence
  Synthetic
gggacagagagagggagca

SEQ ID NO: 3503 - RNA, 19 nt, Artificial Sequence
  Synthetic
agggccuggggcagccuag

SEQ ID NO: 3504 - RNA, 19 nt, Artificial Sequence
  Synthetic
ggccuggugugucugcaca

SEQ ID NO: 3505 - RNA, 19 nt, Artificial Sequence
  Synthetic
ccaugggcugcggcugagg

SEQ ID NO: 3506 - RNA, 19 nt, Artificial Sequence
  Synthetic
gcuggcccacccgcagguc

SEQ ID NO: 3507 - RNA, 19 nt, Artificial Sequence
  Synthetic
ggggcuccacugggggccg

SEQ ID NO: 3508 - RNA, 19 nt, Artificial Sequence
  Synthetic
gcaaugugggcucuggugg

SEQ ID NO: 3509 - RNA, 19 nt, Artificial Sequence
  Synthetic
ggggacgcugcagggccag

SEQ ID NO: 3510 - RNA, 19 nt, Artificial Sequence
  Synthetic
ggugguggugcaggcgcug

SEQ ID NO: 3511 - RNA, 19 nt, Artificial Sequence
  Synthetic
gcaggccugcuaggaagag

SEQ ID NO: 3512 - RNA, 19 nt, Artificial Sequence
  Synthetic
ccaccgagcgcugcugcug

SEQ ID NO: 3513 - RNA, 19 nt, Artificial Sequence
  Synthetic
uggagagccucaugggcuc

SEQ ID NO: 3514 - RNA, 19 nt, Artificial Sequence
  Synthetic
cgggcaucggcguguccau

SEQ ID NO: 3515 - RNA, 19 nt, Artificial Sequence
  Synthetic
ggggucccaccugcaacuc

SEQ ID NO: 3516 - RNA, 19 nt, Artificial Sequence
  Synthetic
gccgcagcucuuguuccug

SEQ ID NO: 3517 - RNA, 19 nt, Artificial Sequence
  Synthetic
uguccuuguggagaagcug

SEQ ID NO: 3518 - RNA, 19 nt, Artificial Sequence
  Synthetic
cagcacuucgcuugcucuu

SEQ ID NO: 3519 - RNA, 19 nt, Artificial Sequence
  Synthetic
ugaccacgcugcuggcuac

SEQ ID NO: 3520 - RNA, 19 nt, Artificial Sequence
  Synthetic
ccuccgcuagcuucugcuu

SEQ ID NO: 3521 - RNA, 19 nt, Artificial Sequence
  Synthetic
gcuguuuuuucagaaucac

SEQ ID NO: 3522 - RNA, 19 nt, Artificial Sequence
  Synthetic
uucuuucuagggccgccug

SEQ ID NO: 3523 - RNA, 19 nt, Artificial Sequence
  Synthetic
ggcuguugggauggacugu

SEQ ID NO: 3524 - RNA, 19 nt, Artificial Sequence
  Synthetic
uucuguagggaaugccggg

SEQ ID NO: 3525 - RNA, 19 nt, Artificial Sequence
  Synthetic
ucuccaggggcuccagggu

SEQ ID NO: 3526 - RNA, 19 nt, Artificial Sequence
  Synthetic
agcggguggcuccuuccgu

SEQ ID NO: 3527 - RNA, 19 nt, Artificial Sequence
  Synthetic
aaaagcugcugagcaugga

SEQ ID NO: 3528 - RNA, 19 nt, Artificial Sequence
  Synthetic
ggcugggaacaggaggcaa

SEQ ID NO: 3529 - RNA, 19 nt, Artificial Sequence
  Synthetic
cuggggggucacugggcag

SEQ ID NO: 3530 - RNA, 19 nt, Artificial Sequence
  Synthetic
ugcgcagagggaagugcuc

SEQ ID NO: 3531 - RNA, 19 nt, Artificial Sequence
  Synthetic
ugggcucagagacugucuu

SEQ ID NO: 3532 - RNA, 19 nt, Artificial Sequence
  Synthetic
uauagcgcagcuucagguu

SEQ ID NO: 3533 - RNA, 19 nt, Artificial Sequence
  Synthetic
ccagggacuucuugggcuu

SEQ ID NO: 3534 - RNA, 19 nt, Artificial Sequence
  Synthetic
guggauucuuccuccgcuc

SEQ ID NO: 3535 - RNA, 19 nt, Artificial Sequence
  Synthetic
cacucuccuuucggagcag

SEQ ID NO: 3536 - RNA, 19 nt, Artificial Sequence
  Synthetic
gccggaggcuggggggcgc

SEQ ID NO: 3537 - RNA, 19 nt, Artificial Sequence
  Synthetic
gggucucugcgggccgccg

SEQ ID NO: 3538 - RNA, 19 nt, Artificial Sequence
  Synthetic
uuggggaggagucuccgag

SEQ ID NO: 3539 - RNA, 19 nt, Artificial Sequence
  Synthetic
cgggcgugcugcuacuacu

SEQ ID NO: 3540 - RNA, 19 nt, Artificial Sequence
  Synthetic
gggagcugcacccugaugc

SEQ ID NO: 3541 - RNA, 19 nt, Artificial Sequence
  Synthetic
cgugcucgcugucauuggg

SEQ ID NO: 3542 - RNA, 19 nt, Artificial Sequence
  Synthetic
ccaggaugggauuggggcc

SEQ ID NO: 3543 - RNA, 19 nt, Artificial Sequence
  Synthetic
uccugcggucacugucgcc

SEQ ID NO: 3544 - RNA, 19 nt, Artificial Sequence
  Synthetic
ggcccagagucggaugggu

SEQ ID NO: 3545 - RNA, 19 nt, Artificial Sequence
  Synthetic
ccaggauuggcccccgagg

SEQ ID NO: 3546 - RNA, 19 nt, Artificial Sequence
  Synthetic
ggggagugugggggcuccc

SEQ ID NO: 3547 - RNA, 19 nt, Artificial Sequence
  Synthetic
agccauggggcaggaagag

SEQ ID NO: 3548 - RNA, 19 nt, Artificial Sequence
  Synthetic
ccccagccucgggcuccaa

SEQ ID NO: 3549 - RNA, 19 nt, Artificial Sequence
  Synthetic
ggcgagagggcaaggugcc

SEQ ID NO: 3550 - RNA, 19 nt, Artificial Sequence
  Synthetic
ggaggagaaugggcugcag

SEQ ID NO: 3551 - RNA, 19 nt, Artificial Sequence
  Synthetic
gagagccugagggguccag

SEQ ID NO: 3552 - RNA, 19 nt, Artificial Sequence
  Synthetic
cagucagcagcggggcaug

SEQ ID NO: 3553 - RNA, 19 nt, Artificial Sequence
  Synthetic
agggcccaagcccgggcac

SEQ ID NO: 3554 - RNA, 19 nt, Artificial Sequence
  Synthetic
gggcaaaguggaagggcaa

SEQ ID NO: 3555 - RNA, 19 nt, Artificial Sequence
  Synthetic
cgguggucauuaaggacug

SEQ ID NO: 3556 - RNA, 19 nt, Artificial Sequence
  Synthetic
cugacccagagagccgcuc

SEQ ID NO: 3557 - RNA, 19 nt, Artificial Sequence
  Synthetic
ucaguggccaguggaggcc

SEQ ID NO: 3558 - RNA, 19 nt, Artificial Sequence
  Synthetic
gcucugagcgaguccggcu

SEQ ID NO: 3559 - RNA, 19 nt, Artificial Sequence
  Synthetic
uggcacuggggggcagggg

SEQ ID NO: 3560 - RNA, 19 nt, Artificial Sequence
  Synthetic
ccggcggugggggagcggu

SEQ ID NO: 3561 - RNA, 19 nt, Artificial Sequence
  Synthetic
ggcggggcugcauggggcc

SEQ ID NO: 3562 - RNA, 19 nt, Artificial Sequence
  Synthetic
gaguuuugagcugcuccag

SEQ ID NO: 3563 - RNA, 19 nt, Artificial Sequence
  Synthetic
ucuugaucaccuggacgug

SEQ ID NO: 3564 - RNA, 19 nt, Artificial Sequence
  Synthetic
cacucggcuuggcugaccu

SEQ ID NO: 3565 - RNA, 19 nt, Artificial Sequence
  Synthetic
gccgcagccggggcuucuc

SEQ ID NO: 3566 - RNA, 19 nt, Artificial Sequence
  Synthetic
cuucagccgaggguaucug

SEQ ID NO: 3567 - RNA, 19 nt, Artificial Sequence
  Synthetic
cgccaucugucuccagguc

SEQ ID NO: 3568 - RNA, 19 nt, Artificial Sequence
  Synthetic
ccaccuggcccgguccccc

SEQ ID NO: 3569 - RNA, 19 nt, Artificial Sequence
  Synthetic
gcuccaggccaucguccac

SEQ ID NO: 3570 - RNA, 19 nt, Artificial Sequence
  Synthetic
cauggcccagcucccugug

SEQ ID NO: 3571 - RNA, 19 nt, Artificial Sequence
  Synthetic
cucuggccucaggcugccc

SEQ ID NO: 3572 - RNA, 19 nt, Artificial Sequence
  Synthetic
gcuggagaggagcggggcc

SEQ ID NO: 3573 - RNA, 19 nt, Artificial Sequence
  Synthetic
gcaacaccugagggugcug

SEQ ID NO: 3574 - RNA, 19 nt, Artificial Sequence
  Synthetic
gucgcugcuguucccagag

SEQ ID NO: 3575 - RNA, 19 nt, Artificial Sequence
  Synthetic
gggggagccgcccagccag

SEQ ID NO: 3576 - RNA, 19 nt, Artificial Sequence
  Synthetic
uguccccggugcugccccg

SEQ ID NO: 3577 - RNA, 19 nt, Artificial Sequence
  Synthetic
ccagaggaagcagcacagu

SEQ ID NO: 3578 - RNA, 19 nt, Artificial Sequence
  Synthetic
gccggugcccacccugggc

SEQ ID NO: 3579 - RNA, 19 nt, Artificial Sequence
  Synthetic
acugagcccgggacagagg

SEQ ID NO: 3580 - RNA, 19 nt, Artificial Sequence
  Synthetic
caggugcggcuggggaaga

SEQ ID NO: 3581 - RNA, 19 nt, Artificial Sequence
  Synthetic
cuggggcugacagugaggc

SEQ ID NO: 3582 - RNA, 19 nt, Artificial Sequence
  Synthetic
gggccuggcuggcaggcuc

SEQ ID NO: 3583 - RNA, 19 nt, Artificial Sequence
  Synthetic
cugagcuggagaggacucg

SEQ ID NO: 3584 - RNA, 19 nt, Artificial Sequence
  Synthetic
ggguccuggcaggggucuc

SEQ ID NO: 3585 - RNA, 19 nt, Artificial Sequence
  Synthetic
gcccuguggugaagggcag

SEQ ID NO: 3586 - RNA, 19 nt, Artificial Sequence
  Synthetic
ugaccgagucauagaucag

SEQ ID NO: 3587 - RNA, 19 nt, Artificial Sequence
  Synthetic
agcacuggugcuucagcau

SEQ ID NO: 3588 - RNA, 19 nt, Artificial Sequence
  Synthetic
ugcuguugucaccgcagga

SEQ ID NO: 3589 - RNA, 19 nt, Artificial Sequence
  Synthetic
cggcgugcuccgggugccu

SEQ ID NO: 3590 - RNA, 19 nt, Artificial Sequence
  Synthetic
agaugcucuggaugcggcc

SEQ ID NO: 3591 - RNA, 19 nt, Artificial Sequence
  Synthetic
gcuccugcagccgggacca

SEQ ID NO: 3592 - RNA, 19 nt, Artificial Sequence
  Synthetic
acuggcuccggagcccccg

SEQ ID NO: 3593 - RNA, 19 nt, Artificial Sequence
  Synthetic
ggccucggagacacucaca

SEQ ID NO: 3594 - RNA, 19 nt, Artificial Sequence
  Synthetic
cuuccagggaggccuuccg

SEQ ID NO: 3595 - RNA, 19 nt, Artificial Sequence
  Synthetic
aguggaccgacugcagcuc

SEQ ID NO: 3596 - RNA, 19 nt, Artificial Sequence
  Synthetic
ggagcacgugccgcucaga

SEQ ID NO: 3597 - RNA, 19 nt, Artificial Sequence
  Synthetic
gcggguuggugccguagag

SEQ ID NO: 3598 - RNA, 19 nt, Artificial Sequence
  Synthetic
ccaguuugaggcggcugag

SEQ ID NO: 3599 - RNA, 19 nt, Artificial Sequence
  Synthetic
cugccagcuucccguuguc

SEQ ID NO: 3600 - RNA, 19 nt, Artificial Sequence
  Synthetic
uccgcugugccaggagccc

SEQ ID NO: 3601 - RNA, 19 nt, Artificial Sequence
  Synthetic
agggcagcaucucaaacau

SEQ ID NO: 3602 - RNA, 19 nt, Artificial Sequence
  Synthetic
ccaccccaaccccaccaca

SEQ ID NO: 3603 - RNA, 19 nt, Artificial Sequence
  Synthetic
uccagauggugucaguguc

SEQ ID NO: 3604 - RNA, 19 nt, Artificial Sequence
  Synthetic
uggaggaaugaagcucauu

SEQ ID NO: 3605 - RNA, 19 nt, Artificial Sequence
  Synthetic
cggcccagcgggcugcauu

SEQ ID NO: 3606 - RNA, 19 nt, Artificial Sequence
  Synthetic
ggucagugacacugccagc

SEQ ID NO: 3607 - RNA, 19 nt, Artificial Sequence
  Synthetic
aagccacuuugaaggcgag

SEQ ID NO: 3608 - RNA, 19 nt, Artificial Sequence
  Synthetic
cauucuuuagcucacgaga

SEQ ID NO: 3609 - RNA, 19 nt, Artificial Sequence
  Synthetic
gccgcaccacagcgaaacc

SEQ ID NO: 3610 - RNA, 19 nt, Artificial Sequence
  Synthetic
cugcaugguguccuggggg

SEQ ID NO: 3611 - RNA, 19 nt, Artificial Sequence
  Synthetic
ccauggcuguugaaugauc

SEQ ID NO: 3612 - RNA, 19 nt, Artificial Sequence
  Synthetic
aguugaagaagcagaagcc

SEQ ID NO: 3613 - RNA, 19 nt, Artificial Sequence
  Synthetic
ggcaggcgauggccacuga

SEQ ID NO: 3614 - RNA, 19 nt, Artificial Sequence
  Synthetic
ucugcuguugcagcugccg

SEQ ID NO: 3615 - RNA, 19 nt, Artificial Sequence
  Synthetic
uggccuugcuggccuugcu

SEQ ID NO: 3616 - RNA, 19 nt, Artificial Sequence
  Synthetic
cuacaaugaggaucuugcu

SEQ ID NO: 3617 - RNA, 19 nt, Artificial Sequence
  Synthetic
cauggugcacgucccaguc

SEQ ID NO: 3618 - RNA, 19 nt, Artificial Sequence
  Synthetic
uuugcugggugccguugcc

SEQ ID NO: 3619 - RNA, 19 nt, Artificial Sequence
  Synthetic
uggggucuugguagaaggu

SEQ ID NO: 3620 - RNA, 19 nt, Artificial Sequence
  Synthetic
gggagauguagagcacacu

SEQ ID NO: 3621 - RNA, 19 nt, Artificial Sequence
  Synthetic
cgucgucauggcgaugcag

SEQ ID NO: 3622 - RNA, 19 nt, Artificial Sequence
  Synthetic
uccccgggaagaaguugcc

SEQ ID NO: 3623 - RNA, 19 nt, Artificial Sequence
  Synthetic
ccucauccacagccccacu

SEQ ID NO: 3624 - RNA, 19 nt, Artificial Sequence
  Synthetic
caccgcugccagccccuac

SEQ ID NO: 3625 - RNA, 19 nt, Artificial Sequence
  Synthetic
cauugacauugaagcccuc

SEQ ID NO: 3626 - RNA, 19 nt, Artificial Sequence
  Synthetic
gaccuccagcccaggccac

SEQ ID NO: 3627 - RNA, 19 nt, Artificial Sequence
  Synthetic
cccccauggggggguccag

SEQ ID NO: 3628 - RNA, 19 nt, Artificial Sequence
  Synthetic
cagccagguacucaggauc

SEQ ID NO: 3629 - RNA, 19 nt, Artificial Sequence
  Synthetic
ucacgacuauccugaaagc

SEQ ID NO: 3630 - RNA, 19 nt, Artificial Sequence
  Synthetic
acucucgggcgaugggcau

SEQ ID NO: 3631 - RNA, 19 nt, Artificial Sequence
  Synthetic
ggacuaggucuggagagaa

SEQ ID NO: 3632 - RNA, 19 nt, Artificial Sequence
  Synthetic
caaauccagcagacaccag

SEQ ID NO: 3633 - RNA, 19 nt, Artificial Sequence
  Synthetic
ggugacccucagcagcauc

SEQ ID NO: 3634 - RNA, 19 nt, Artificial Sequence
  Synthetic
agccacccaguggggccgg

SEQ ID NO: 3635 - RNA, 19 nt, Artificial Sequence
  Synthetic
auuuggcagaaacauggua

SEQ ID NO: 3636 - RNA, 19 nt, Artificial Sequence
  Synthetic
gcgucauguauccaaaaca

SEQ ID NO: 3637 - RNA, 19 nt, Artificial Sequence
  Synthetic
ccagguucaucaguugcug

SEQ ID NO: 3638 - RNA, 19 nt, Artificial Sequence
  Synthetic
gcaccacugcgccuccugc

SEQ ID NO: 3639 - RNA, 19 nt, Artificial Sequence
  Synthetic
ggccacccuccaaggccag

SEQ ID NO: 3640 - RNA, 19 nt, Artificial Sequence
  Synthetic
agauggcugugaggucaug

SEQ ID NO: 3641 - RNA, 19 nt, Artificial Sequence
  Synthetic
aggccucagaggcgucaca

SEQ ID NO: 3642 - RNA, 19 nt, Artificial Sequence
  Synthetic
ccagaagagcagccacaca

SEQ ID NO: 3643 - RNA, 19 nt, Artificial Sequence
  Synthetic
ggggauccacccuguuacc

SEQ ID NO: 3644 - RNA, 19 nt, Artificial Sequence
  Synthetic
uccagccuucuucugaaag

SEQ ID NO: 3645 - RNA, 19 nt, Artificial Sequence
  Synthetic
gagguugggguuucuguuu

SEQ ID NO: 3646 - RNA, 19 nt, Artificial Sequence
  Synthetic
cagagagcggauggcauug

SEQ ID NO: 3647 - RNA, 19 nt, Artificial Sequence
  Synthetic
cacccggaucacggccucc

SEQ ID NO: 3648 - RNA, 19 nt, Artificial Sequence
  Synthetic
gccccaguauuuacugugc

SEQ ID NO: 3649 - RNA, 19 nt, Artificial Sequence
  Synthetic
ggccaggcgcugcaugcag

SEQ ID NO: 3650 - RNA, 19 nt, Artificial Sequence
  Synthetic
ccaggagucuggacaggag

SEQ ID NO: 3651 - RNA, 19 nt, Artificial Sequence
  Synthetic
cccuggcacucuaggcacc

SEQ ID NO: 3652 - RNA, 19 nt, Artificial Sequence
  Synthetic
cacuucuucuuugucagcc

SEQ ID NO: 3653 - RNA, 19 nt, Artificial Sequence
  Synthetic
cagugcggucacugccucc

SEQ ID NO: 3654 - RNA, 19 nt, Artificial Sequence
  Synthetic
gcccacagagagggacgcc

SEQ ID NO: 3655 - RNA, 19 nt, Artificial Sequence
  Synthetic
ccuaucuucagccaggaug

SEQ ID NO: 3656 - RNA, 19 nt, Artificial Sequence
  Synthetic
caccagcugcuccgagggc

SEQ ID NO: 3657 - RNA, 19 nt, Artificial Sequence
  Synthetic
cauagguucuuccuccucc

SEQ ID NO: 3658 - RNA, 19 nt, Artificial Sequence
  Synthetic
uccagagccuuagagauuc

SEQ ID NO: 3659 - RNA, 19 nt, Artificial Sequence
  Synthetic
ggugggcgggcagaugguu

SEQ ID NO: 3660 - RNA, 19 nt, Artificial Sequence
  Synthetic
accaggucccaagggcaug

SEQ ID NO: 3661 - RNA, 19 nt, Artificial Sequence
  Synthetic
gccagggguuagaagagaa

SEQ ID NO: 3662 - RNA, 19 nt, Artificial Sequence
  Synthetic
ccaggaaugggggcuauug

SEQ ID NO: 3663 - RNA, 19 nt, Artificial Sequence
  Synthetic
cacaggaucucuaaagacc

SEQ ID NO: 3664 - RNA, 19 nt, Artificial Sequence
  Synthetic
ugguuccaacuacuugccc

SEQ ID NO: 3665 - RNA, 19 nt, Artificial Sequence
  Synthetic
agcaggcaggcuguucucu

SEQ ID NO: 3666 - RNA, 19 nt, Artificial Sequence
  Synthetic
cccugggauaacugucaaa

SEQ ID NO: 3667 - RNA, 23 nt, Artificial Sequence
  Synthetic
ugcaggaccacgacaggauuaag

SEQ ID NO: 3668 - RNA, 23 nt, Artificial Sequence
  Synthetic
gaccacgacaggauuaagugagg

SEQ ID NO: 3669 - RNA, 23 nt, Artificial Sequence
  Synthetic
cacgccgaugcccgaguugcagg

SEQ ID NO: 3670 - RNA, 23 nt, Artificial Sequence
  Synthetic
cagaagcuagcggaggugauucu

SEQ ID NO: 3671 - RNA, 23 nt, Artificial Sequence
  Synthetic
ggcggcccuagaaagaacagucc

SEQ ID NO: 3672 - RNA, 23 nt, Artificial Sequence
  Synthetic
cagcaggcggcccuagaaagaac

SEQ ID NO: 3673 - RNA, 23 nt, Artificial Sequence
  Synthetic
ugcgcuauaagcccaagaagucc

SEQ ID NO: 3674 - RNA, 23 nt, Artificial Sequence
  Synthetic
aacucacguccaggugaucaaga

SEQ ID NO: 3675 - DNA, 21 bp, Artificial Sequence
  Synthetic
caggaccacgacaggauuatt

SEQ ID NO: 3676 - DNA, 21 bp, Artificial Sequence
  Synthetic
ccacgacaggauuaagugatt

SEQ ID NO: 3677 - DNA, 21 bp, Artificial Sequence
  Synthetic
cgccgaugcccgaguugcatt

SEQ ID NO: 3678 - DNA, 21 bp, Artificial Sequence
  Synthetic
gaagcuagcggaggugauutt

SEQ ID NO: 3679 - DNA, 21 bp, Artificial Sequence
  Synthetic
cggcccuagaaagaacagutt

SEQ ID NO: 3680 - DNA, 21 bp, Artificial Sequence
  Synthetic
gcaggcggcccuagaaagatt

SEQ ID NO: 3681 - DNA, 21 bp, Artificial Sequence
  Synthetic
cgcuauaagcccaagaagutt

SEQ ID NO: 3682 - DNA, 21 bp, Artificial Sequence
  Synthetic
cucacguccaggugaucaatt

SEQ ID NO: 3683 - DNA, 21 bp, Artificial Sequence
  Synthetic
uaauccugucgugguccugtt

SEQ ID NO: 3684 - DNA, 21 bp, Artificial Sequence
  Synthetic
ucacuuaauccugucguggtt

SEQ ID NO: 3685 - DNA, 21 bp, Artificial Sequence
  Synthetic
ugcaacucgggcaucggcgtt

SEQ ID NO: 3686 - DNA, 21 bp, Artificial Sequence
  Synthetic
aaucaccuccgcuagcuuctt

SEQ ID NO: 3687 - DNA, 21 bp, Artificial Sequence
  Synthetic
acuguucuuucuagggccgtt

SEQ ID NO: 3688 - DNA, 21 bp, Artificial Sequence
  Synthetic
ucuuucuagggccgccugctt

SEQ ID NO: 3689 - DNA, 21 bp, Artificial Sequence
  Synthetic
acuucuugggcuuauagcgtt

SEQ ID NO: 3690 - DNA, 21 bp, Artificial Sequence
  Synthetic
uugaucaccuggacgugagtt

SEQ ID NO: 3691 - DNA, 21 bp, Artificial Sequence
  Synthetic
  misc_feature (1)..(1): 5'-3 attached inverted deoxyabasic moiety.
  misc_feature (1)..(1): 2'deoxy-2'-fluoro
  misc_feature (6)..(7): 2'deoxy-2'-fluoro
  misc_feature (9)..(9): 2'deoxy-2'-fluoro
  misc_feature (12)..(12): 2'deoxy-2'-fluoro
  misc_feature (17)..(18): 2'deoxy-2'-fluoro
  misc_feature (21)..(21): 3'-3 attached inverted deoxyabasic moiety.
caggaccacgacaggauuatt

SEQ ID NO: 3692 - DNA, 21 bp, Artificial Sequence
  Synthetic
  misc_feature (1)..(1): 5'-3 attached inverted deoxyabasic moiety.
  misc_feature (1)..(2): 2'deoxy-2'-fluoro
  misc_feature (4)..(4): 2'deoxy-2'-fluoro
  misc_feature (7)..(7): 2'deoxy-2'-fluoro
  misc_feature (12)..(13): 2'deoxy-2'-fluoro
  misc_feature (17)..(17): 2'deoxy-2'-fluoro
  misc_feature (21)..(21): 3'-3 attached inverted deoxyabasic moiety.
ccacgacaggauuaagugatt

SEQ ID NO: 3693 - DNA, 21 bp, Artificial Sequence
  Synthetic
  misc_feature (1)..(1): 5'-3 attached inverted deoxyabasic moiety.
  misc_feature (1)..(1): 2'deoxy-2'-fluoro
  misc_feature (3)..(4): 2'deoxy-2'-fluoro
  misc_feature (7)..(7): 2'deoxy-2'-fluoro
  misc_feature (9)..(11): 2'deoxy-2'-fluoro
  misc_feature (15)..(16): 2'deoxy-2'-fluoro
  misc_feature (18)..(18): 2'deoxy-2'-fluoro
  misc_feature (21)..(21): 3'-3 attached inverted deoxyabasic moiety.
cgccgaugcccgaguugcatt

SEQ ID NO: 3694 - DNA, 21 bp, Artificial Sequence
  Synthetic
  misc_feature (1)..(1): 5'-3 attached inverted deoxyabasic moiety.
  misc_feature (5)..(6): 2'deoxy-2'-fluoro
  misc_feature (9)..(9): 2'deoxy-2'-fluoro
  misc_feature (15)..(15): 2'deoxy-2'-fluoro
  misc_feature (18)..(19): 2'deoxy-2'-fluoro
  misc_feature (21)..(21): 3'-3 attached inverted deoxyabasic moiety.
gaagcuagcggaggugauutt

SEQ ID NO: 3695 - DNA, 21 bp, Artificial Sequence
  Synthetic
  misc_feature (1)..(1): 5'-3 attached inverted deoxyabasic moiety.
  misc_feature (1)..(1): 2'deoxy-2'-fluoro
  misc_feature (4)..(7): 2'deoxy-2'-fluoro
  misc_feature (16)..(16): 2'deoxy-2'-fluoro
  misc_feature (19)..(19): 2'deoxy-2'-fluoro
  misc_feature (21)..(21): 3'-3 attached inverted deoxyabasic moiety.
cggcccuagaaagaacagutt

SEQ ID NO: 3696 - DNA, 21 bp, Artificial Sequence
  Synthetic
  misc_feature (1)..(1): 5'-3 attached inverted deoxyabasic moiety.
  misc_feature (2)..(2): 2'deoxy-2'-fluoro
  misc_feature (6)..(6): 2'deoxy-2'-fluoro
  misc_feature (9)..(12): 2'deoxy-2'-fluoro
  misc_feature (21)..(21): 3'-3 attached inverted deoxyabasic moiety.
gcaggcggcccuagaaagatt

SEQ ID NO: 3697 - DNA, 21 bp, Artificial Sequence
  Synthetic
  misc_feature (1)..(1): 5'-3 attached inverted deoxyabasic moiety.
  misc_feature (1)..(1): 2'deoxy-2'-fluoro
  misc_feature (3)..(4): 2'deoxy-2'-fluoro
  misc_feature (6)..(6): 2'deoxy-2'-fluoro
  misc_feature (10)..(12): 2'deoxy-2'-fluoro
  misc_feature (19)..(19): 2'deoxy-2'-fluoro
  misc_feature (21)..(21): 3'-3 attached inverted deoxyabasic moiety.
cgcuauaagcccaagaagutt

SEQ ID NO: 3698 - DNA, 21 bp, Artificial Sequence
  Synthetic
  misc_feature (1)..(1): 5'-3 attached inverted deoxyabasic moiety.
  misc_feature (1)..(3): 2'deoxy-2'-fluoro
  misc_feature (5)..(5): 2'deoxy-2'-fluoro
  misc_feature (7)..(9): 2'deoxy-2'-fluoro
  misc_feature (13)..(13): 2'deoxy-2'-fluoro
  misc_feature (16)..(17): 2'deoxy-2'-fluoro
  misc_feature (21)..(21): 3'-3 attached inverted deoxyabasic moiety.
cucacguccaggugaucaatt

SEQ ID NO: 3699 - DNA, 21 bp, Artificial Sequence
  Synthetic
  misc_feature (1)..(1): 2'deoxy-2'-fluoro
  misc_feature (4)..(7): 2'deoxy-2'-fluoro
  misc_feature (9)..(10): 2'deoxy-2'-fluoro
  misc_feature (12)..(12): 2'deoxy-2'-fluoro
  misc_feature (15)..(18): 2'deoxy-2'-fluoro
  misc_feature (20)..(21): phosphorothioate linkage
uaauccugucgugguccugtt

SEQ ID NO: 3700 - DNA, 21 bp, Artificial Sequence
  Synthetic
  misc_feature (1)..(2): 2'-deoxy-2'-fluoro
  misc_feature (4)..(6): 2'-deoxy-2'-fluoro
  misc_feature (9)..(12): 2'-deoxy-2'-fluoro
  misc_feature (14)..(15): 2'-deoxy-2'-fluoro
  misc_feature (17)..(17): 2'-deoxy-2'-fluoro
  misc_feature (20)..(21): phosphorothioate linkage
ucacuuaauccugucguggtt

SEQ ID NO: 3701 - DNA, 21 bp, Artificial Sequence
  Synthetic
  misc_feature (1)..(1): 2'-deoxy-2'-fluoro
  misc_feature (3)..(3): 2'-deoxy-2'-fluoro
  misc_feature (6)..(8): 2'-deoxy-2'-fluoro
  misc_feature (12)..(12): 2'-deoxy-2'-fluoro
  misc_feature (14)..(15): 2'-deoxy-2'-fluoro
  misc_feature (18)..(18): 2'-deoxy-2'-fluoro
  misc_feature (20)..(21): phosphorothioate linkage
ugcaacucgggcaucggcgtt

SEQ ID NO: 3702 - DNA, 21 bp, Artificial Sequence
  Synthetic
  misc_feature (3)..(4): 2'-deoxy-2'-fluoro
  misc_feature (6)..(10): 2'-deoxy-2'-fluoro
  misc_feature (12)..(13): 2'-deoxy-2'-fluoro
  misc_feature (16)..(19): 2'-deoxy-2'-fluoro
  misc_feature (20)..(21): phosphorothioate linkage
aaucaccuccgcuagcuuctt

SEQ ID NO: 3703 - DNA, 21 bp, Artificial Sequence
  Synthetic
  misc_feature (2)..(3): 2'-deoxy-2'-fluoro
  misc_feature (5)..(12): 2'-deoxy-2'-fluoro
  misc_feature (17)..(18): 2'-deoxy-2'-fluoro
  misc_feature (20)..(21): phosphorothioate linkage
acuguucuuucuagggccgtt

SEQ ID NO: 3704 - DNA, 21 bp, Artificial Sequence
  Synthetic
  misc_feature (1)..(7): 2'-deoxy-2'-fluoro
  misc_feature (12)..(13): 2'-deoxy-2'-fluoro
  misc_feature (15)..(17): 2'-deoxy-2'-fluoro
  misc_feature (19)..(19): 2'-deoxy-2'-fluoro
  misc_feature (20)..(21): phosphorothioate linkage
ucuuucuagggccgccugctt

SEQ ID NO: 3705 - DNA, 21 bp, Artificial Sequence
  Synthetic
  misc_feature (2)..(7): 2'-deoxy-2'-fluoro
  misc_feature (11)..(13): 2'-deoxy-2'-fluoro
  misc_feature (15)..(15): 2'-deoxy-2'-fluoro
  misc_feature (18)..(18): 2'-deoxy-2'-fluoro
  misc_feature (20)..(21): phosphorothioate linkage
acuucuugggcuuauagcgtt

SEQ ID NO: 3706 - DNA, 21 bp, Artificial Sequence
  Synthetic
  misc_feature (1)..(2): 2'-deoxy-2'-fluoro
  misc_feature (5)..(6): 2'-deoxy-2'-fluoro
  misc_feature (8)..(10): 2'-deoxy-2'-fluoro
  misc_feature (14)..(14): 2'-deoxy-2'-fluoro
  misc_feature (16)..(16): 2'-deoxy-2'-fluoro
  misc_feature (20)..(21): phosphorothioate linkage
uugaucaccuggacgugagtt

SEQ ID NO: 3707 - DNA, 21 bp, Artificial Sequence
  Synthetic
  misc_feature (1)..(1): 5'-3 attached inverted deoxyabasic moiety.
  misc_feature (1)..(1): 2'-deoxy-2'-fluoro
  misc_feature (2)..(2): deoxy Adenosine
  misc_feature (3)..(4): deoxy Guanosine
  misc_feature (5)..(5): deoxy Adenosine
  misc_feature (6)..(7): 2'-deoxy-2'-fluoro
  misc_feature (8)..(8): deoxy Adenosine
  misc_feature (9)..(9): 2'-deoxy-2'-fluoro
  misc_feature (10)..(10): deoxy Guanosine
  misc_feature (11)..(11): deoxy Adenosine
  misc_feature (12)..(12): 2'-deoxy-2'-fluoro
  misc_feature (13)..(13): deoxy Adenosine
  misc_feature (14)..(15): deoxy Guanosine
  misc_feature (16)..(16): deoxy Adenosine
  misc_feature (17)..(18): 2'-deoxy-2'-fluoro
  misc_feature (19)..(19): deoxy Adenosine
  misc_feature (21)..(21): 3'-3 attached inverted deoxyabasic moiety.
caggaccacgacaggauuatt

SEQ ID NO: 3708 - DNA, 21 bp, Artificial Sequence
  Synthetic
  misc_feature (1)..(1): 5'-3 attached inverted deoxyabasic moiety.
  misc_feature (1)..(2): 2'-deoxy-2'-fluoro
  misc_feature (3)..(3): deoxy Adenosine
  misc_feature (4)..(4): 2'-deoxy-2'-fluoro
  misc_feature (5)..(5): deoxy Guanosine
  misc_feature (6)..(6): deoxy Adenosine
  misc_feature (7)..(7): 2'-deoxy-2'-fluoro
  misc_feature (8)..(8): deoxy Adenosine
  misc_feature (9)..(10): deoxyGuanosine
  misc_feature (11)..(11): deoxy Adenosine
  misc_feature (12)..(13): 2'-deoxy-2'-fluoro
  misc_feature (14)..(15): deoxy Adenosine
  misc_feature (16)..(16): deoxy Guanosine
  misc_feature (17)..(17): 2'-deoxy-2'-fluoro
  misc_feature (18)..(18): deoxy Guanosine
  misc_feature (19)..(19): deoxy Adenosine
  misc_feature (21)..(21): 3'-3 attached inverted deoxyabasic moiety.
ccacgacaggauuaagugatt

SEQ ID NO: 3709 - DNA, 21 bp, Artificial Sequence
  Synthetic
  misc_feature (1)..(1): 5'-3 attached inverted deoxyabasic moiety.
  misc_feature (1)..(1): 2'-deoxy-2'-fluoro
  misc_feature (2)..(2): deoxy Guanosine
  misc_feature (3)..(4): 2'-deoxy-2'-fluoro
  misc_feature (5)..(5): deoxy Guanosine
  misc_feature (6)..(6): deoxy Adenosine
  misc_feature (7)..(7): 2'-deoxy-2'-fluoro
  misc_feature (8)..(8): deoxy Guanosine
  misc_feature (9)..(11): 2'-deoxy-2'-fluoro
  misc_feature (12)..(12): deoxy Guanosine
  misc_feature (13)..(13): deoxy Adenosine
  misc_feature (14)..(14): deoxy Guanosine
  misc_feature (15)..(16): 2'-deoxy-2'-fluoro
  misc_feature (17)..(17): deoxy Guanosine
  misc_feature (18)..(18): 2'-deoxy-2'-fluoro
  misc_feature (19)..(19): deoxy Adenosine
  misc_feature (21)..(21): 3'-3 attached inverted deoxyabasic moiety.
cgccgaugcccgaguugcatt

SEQ ID NO: 3710 - DNA, 21 bp, Artificial Sequence
  Synthetic
  misc_feature (1)..(1): 5'-3 attached inverted deoxyabasic moiety.
  misc_feature (1)..(1): deoxy Guanosine
  misc_feature (2)..(3): deoxy Adenosine
  misc_feature (4)..(4): deoxy Guanosine
  misc_feature (5)..(6): 2'-deoxy-2'-fluoro
  misc_feature (7)..(7): deoxy Adenosine
  misc_feature (8)..(8): deoxy Guanosine
  misc_feature (9)..(9): 2'-deoxy-2'-fluoro
  misc_feature (10)..(11): deoxy Guanosine
  misc_feature (12)..(12): deoxy Adenosine
  misc_feature (13)..(14): deoxy Guanosine
  misc_feature (15)..(15): 2'-deoxy-2'-fluoro
  misc_feature (16)..(16): deoxy Guanosine
  misc_feature (17)..(17): deoxy Adenosine
  misc_feature (18)..(19): 2'-deoxy-2'-fluoro
  misc_feature (21)..(21): 3'-3 attached inverted deoxyabasic moiety.
gaagcuagcggaggugauutt

SEQ ID NO: 3711 - DNA, 21 bp, Artificial Sequence
  Synthetic
  misc_feature (1)..(1): 5'-3 attached inverted deoxyabasic moiety.
  misc_feature (1)..(1): 2'-deoxy-2'-fluoro
  misc_feature (2)..(3): deoxy Guanosine
  misc_feature (4)..(7): 2'-deoxy-2'-fluoro
  misc_feature (8)..(8): deoxy Adenosine
  misc_feature (9)..(9): deoxy Guanosine
  misc_feature (10)..(12): deoxy Adenosine
  misc_feature (13)..(13): deoxy Guanosine
  misc_feature (14)..(15): deoxy Adenosine
  misc_feature (16)..(16): 2'-deoxy-2'-fluoro
  misc_feature (17)..(17): deoxy Adenosine
  misc_feature (18)..(18): deoxy Guanosine
  misc_feature (19)..(19): 2'-deoxy-2'-fluoro
  misc_feature (21)..(21): 3'-3 attached inverted deoxyabasic moiety.
cggcccuagaaagaacagutt

SEQ ID NO: 3712 - DNA, 21 bp, Artificial Sequence
  Synthetic
  misc_feature (1)..(1): 5'-3 attached inverted deoxyabasic moiety.
  misc_feature (1)..(1): deoxy Guanosine
  misc_feature (2)..(2): 2'-deoxy-2'-fluoro
  misc_feature (3)..(3): deoxy Adenosine
  misc_feature (4)..(5): deoxy Guanosine
  misc_feature (6)..(6): 2'-deoxy-2'-fluoro
  misc_feature (7)..(8): deoxy Guanosine
  misc_feature (9)..(12): 2'-deoxy-2'-fluoro
  misc_feature (13)..(13): deoxy Adenosine
  misc_feature (14)..(14): deoxy Guanosine
  misc_feature (15)..(17): deoxy Adenosine
  misc_feature (18)..(18): deoxy Guanosine
  misc_feature (19)..(19): deoxy Adenosine
  misc_feature (21)..(21): 3'-3 attached inverted deoxyabasic moiety.
gcaggcggcccuagaaagatt

SEQ ID NO: 3713 - DNA, 21 bp, Artificial Sequence
  Synthetic
  misc_feature (1)..(1): 5'-3 attached inverted deoxyabasic moiety.
  misc_feature (1)..(1): 2'-deoxy-2'-fluoro
  misc_feature (2)..(2): deoxy Guanosine
  misc_feature (3)..(4): 2'-deoxy-2'-fluoro
  misc_feature (5)..(5): deoxy Adenosine
  misc_feature (6)..(6): 2'-deoxy-2'-fluoro
  misc_feature (7)..(8): deoxy Adenosine
  misc_feature (9)..(9): deoxy Guanosine
  misc_feature (10)..(12): 2'-deoxy-2'-fluoro
  misc_feature (13)..(14): deoxy Adensoine
  misc_feature (15)..(15): deoxy Guanosine
  misc_feature (16)..(17): deoxy Adenosine
  misc_feature (18)..(18): deoxy Guanosine
  misc_feature (19)..(19): 2'-deoxy-2'-fluoro
  misc_feature (21)..(21): 3'-3 attached inverted deoxyabasic moiety.
cgcuauaagcccaagaagutt

SEQ ID NO: 3714 - DNA, 21 bp, Artificial Sequence
  Synthetic
  misc_feature (1)..(1): 5'-3 attached inverted deoxyabasic moiety.
  misc_feature (1)..(3): 2'-deoxy-2'-fluoro
  misc_feature (4)..(4): deoxy Adenosine
  misc_feature (5)..(5): 2'-deoxy-2'-fluoro
  misc_feature (6)..(6): deoxy Guanosine
  misc_feature (7)..(9): 2'-deoxy-2'-fluoro
  misc_feature (10)..(10): deoxy Adenosine
  misc_feature (11)..(12): deoxy Guanosine
  misc_feature (13)..(13): 2'-deoxy-2'-fluoro
  misc_feature (14)..(14): deoxy Guanosine
  misc_feature (15)..(15): deoxy Adenosine
  misc_feature (16)..(17): 2'-deoxy-2'-fluoro
  misc_feature (18)..(19): deoxy Adenosine
  misc_feature (21)..(21): 3'-3 attached inverted deoxyabasic moiety.
cucacguccaggugaucaatt

SEQ ID NO: 3715 - DNA, 21 bp, Artificial Sequence
  Synthetic
  misc_feature (1)..(1): 2'-deoxy-2'-fluoro
  misc_feature (2)..(3): deoxy Adenosine
  misc_feature (4)..(7): 2'-deoxy-2'-fluoro
  misc_feature (8)..(8): deoxy Guanosine
  misc_feature (9)..(10): 2'-deoxy-2'-fluoro
  misc_feature (11)..(11): deoxy Guanosine
  misc_feature (12)..(12): 2'-deoxy-2'-fluoro
  misc_feature (13)..(14): deoxy Guanosine
  misc_feature (15)..(18): 2'-deoxy-2'-fluoro
  misc_feature (19)..(19): deoxy Guanosine
  misc_feature (20)..(21): phosphorothioate linkage
uaauccugucgugguccugtt

SEQ ID NO: 3716 - DNA, 21 bp, Artificial Sequence
  Synthetic
  misc_feature (1)..(2): 2'-deoxy-2'-fluoro
  misc_feature (3)..(3): deoxy Adenosine
  misc_feature (4)..(6): 2'-deoxy-2'-fluoro
  misc_feature (7)..(8): deoxy Adenosine
  misc_feature (9)..(12): 2'-deoxy-2'-fluoro
  misc_feature (13)..(13): deoxy Guanosine
  misc_feature (14)..(15): 2'-deoxy-2'-fluoro
  misc_feature (16)..(16): deoxy Guanosine
  misc_feature (17)..(17): 2'-deoxy-2'-fluoro
  misc_feature (18)..(19): deoxy Guanosine
  misc_feature (20)..(21): phosphorothioate linkage
ucacuuaauccugucguggtt

SEQ ID NO: 3717 - DNA, 21 bp, Artificial Sequence
  Synthetic
  misc_feature (1)..(1): 2'-deoxy-2'-fluoro
  misc_feature (2)..(2): deoxy Guanosine
  misc_feature (3)..(3): 2'-deoxy-2'-fluoro
  misc_feature (4)..(5): deoxy Adenosine
  misc_feature (6)..(8): 2'-deoxy-2'-fluoro
  misc_feature (9)..(11): deoxy Guanosine
  misc_feature (12)..(12): 2'-deoxy-2'-fluoro
  misc_feature (13)..(13): deoxy Adenosine
  misc_feature (14)..(15): 2'-deoxy-2'-fluoro
  misc_feature (16)..(17): deoxy Guanosine
  misc_feature (18)..(18): 2'-deoxy-2'-fluoro
  misc_feature (19)..(19): deoxy Guanosine
  misc_feature (20)..(21): phosphorothioate linkage
ugcaacucgggcaucggcgtt

SEQ ID NO: 3718 - DNA, 21 bp, Artificial Sequence
  Synthetic
  misc_feature (1)..(2): deoxy Adenosine
  misc_feature (3)..(4): 2'-deoxy-2'-fluoro
  misc_feature (5)..(5): deoxy Adenosine
  misc_feature (6)..(10): 2'-deoxy-2'-fluoro
  misc_feature (11)..(11): deoxy Guanosine
  misc_feature (12)..(13): 2'-deoxy-2'-fluoro
  misc_feature (14)..(14): deoxy Adenosine
  misc_feature (15)..(15): deoxy Guanosine
  misc_feature (16)..(19): 2'-deoxy-2'-fluoro
  misc_feature (20)..(21): phosphorothioate linkage
aaucaccuccgcuagcuuctt

SEQ ID NO: 3719 - DNA, 21 bp, Artificial Sequence
  Synthetic
  misc_feature (1)..(1): deoxy Guanosine
  misc_feature (2)..(3): 2'-deoxy-2'-fluoro
  misc_feature (4)..(4): deoxy Guanosine
  misc_feature (5)..(12): 2'-deoxy-2'-fluoro
  misc_feature (13)..(13): deoxy Adenosine
  misc_feature (14)..(16): deoxy Guanosine
  misc_feature (17)..(18): 2'-deoxy-2'-fluoro
  misc_feature (19)..(19): deoxy Guanosine
  misc_feature (20)..(21): phosphorothioate linkage
acuguucuuucuagggccgtt

SEQ ID NO: 3720 - DNA, 21 bp, Artificial Sequence
  Synthetic
  misc_feature (1)..(7): 2'-deoxy-2'-fluoro
  misc_feature (8)..(8): deoxy Adenosine
  misc_feature (9)..(11): deoxy Guanosine
  misc_feature (12)..(13): 2'-deoxy-2'-fluoro
  misc_feature (14)..(14): deoxy Guanosine
  misc_feature (15)..(17): 2'-deoxy-2'-fluoro
  misc_feature (18)..(18): deoxy Guanosine
  misc_feature (19)..(19): 2'-deoxy-2'-fluoro
  misc_feature (20)..(21): phosphorothioate linkage
ucuuucuagggccgccugctt

SEQ ID NO: 3721 - DNA, 21 bp, Artificial Sequence
  Synthetic
  misc_feature (1)..(1): deoxy Adenosine
  misc_feature (2)..(7): 2'-deoxy-2'-fluoro
  misc_feature (8)..(10): deoxy Guanosine
  misc_feature (11)..(13): 2'-deoxy-2'-fluoro
  misc_feature (14)..(14): deoxy Adenosine
  misc_feature (15)..(15): 2'-deoxy-2'-fluoro
  misc_feature (16)..(16): deoxy Adenosine
  misc_feature (17)..(17): deoxy Guanosine
  misc_feature (18)..(18): 2'-deoxy-2'-fluoro
  misc_feature (19)..(19): deoxy Guanosine
  misc_feature (20)..(21): phosphorothioate linkage
acuucuugggcuuauagcgtt

SEQ ID NO: 3722 - DNA, 21 bp, Artificial Sequence
  Synthetic
  misc_feature (1)..(2): 2'-deoxy-2'-fluoro
  misc_feature (3)..(3): deoxy Guanosine
  misc_feature (4)..(4): deoxy Adenosine
  misc_feature (5)..(6): 2'-deoxy-2'-fluoro
  misc_feature (7)..(7): deoxy Adenosine
  misc_feature (8)..(10): 2'-deoxy-2'-fluoro
  misc_feature (11)..(12): deoxy Guanosine
  misc_feature (13)..(13): deoxy Adenosine
  misc_feature (14)..(14): 2'-deoxy-2'-fluoro
  misc_feature (15)..(15): deoxy Guanosine
  misc_feature (16)..(16): 2'-deoxy-2'-fluoro
  misc_feature (17)..(17): deoxy Guanosine
  misc_feature (18)..(18): deoxy Adenosine
  misc_feature (19)..(19): deoxy Guanosine
  misc_feature (20)..(21): phosphorothioate linkage
uugaucaccuggacgugagtt

SEQ ID NO: 3723 - DNA, 21 bp, Artificial Sequence
  Synthetic
  misc_feature (1)..(1): 5'-3 attached inverted deoxyabasic moiety.
  misc_feature (1)..(1): 2'-deoxy-2'-fluoro
  misc_feature (2)..(2): 2'-O-methyl Adenosine
  misc_feature (3)..(4): 2'-O-methyl Guanosine
  misc_feature (5)..(5): 2'-O-methyl Adenosine
  misc_feature (6)..(7): 2'-deoxy-2'-fluoro
  misc_feature (8)..(8): 2'-O-methyl Adenosine
  misc_feature (9)..(9): 2'-deoxy-2'-fluoro
  misc_feature (10)..(10): 2'-O-methyl Guanosine
  misc_feature (11)..(11): 2'-O-methyl Adenosine
  misc_feature (12)..(12): 2'-deoxy-2'-fluoro
  misc_feature (13)..(13): 2'-O-methyl Adenosine
  misc_feature (14)..(15): 2'-O-methyl Guanosine
  misc_feature (16)..(16): 2'-O-methyl Adenosine
  misc_feature (17)..(18): 2'-deoxy-2'-fluoro
  misc_feature (19)..(19): 2'-O-methyl Adenosine
  misc_feature (21)..(21): 3'-3 attached inverted deoxyabasic moiety.
caggaccacgacaggauuatt

SEQ ID NO: 3724 - DNA, 21 bp, Artificial Sequence
  Synthetic
  misc_feature (1)..(1): 5'-3 attached inverted deoxyabasic moiety.
  misc_feature (1)..(2): 2'-deoxy-2'-fluoro
  misc_feature (3)..(3): 2'-O-methyl Adenosine
  misc_feature (4)..(4): 2'-deoxy-2'-fluoro
  misc_feature (5)..(5): 2'-O-methyl Guanosine
  misc_feature (6)..(6): 2'-O-methyl Adenosine
  misc_feature (7)..(7): 2'-deoxy-2'-fluoro
  misc_feature (8)..(8): 2'-O-methyl Adenosine
  misc_feature (9)..(10): 2'-O-methyl Guanosine
  misc_feature (11)..(11): 2'-O-methyl Adenosine
  misc_feature (12)..(13): 2'-deoxy-2'-fluoro
  misc_feature (14)..(15): 2'-O-methyl Adenosine
  misc_feature (16)..(16): 2'-O-methyl Guanosine
  misc_feature (17)..(17): 2'-deoxy-2'-fluoro
  misc_feature (18)..(18): 2'-O-methyl Guanosine
  misc_feature (19)..(19): 2'-O-methyl Adenosine
  misc_feature (21)..(21): 3'-3 attached inverted deoxyabasic moiety.
ccacgacaggauuaagugatt

SEQ ID NO: 3725 - DNA, 21 bp, Artificial Sequence
  Synthetic
  misc_feature (1)..(1): 5'-3 attached inverted deoxyabasic moiety.
  misc_feature (1)..(1): 2'-deoxy-2'-fluoro
  misc_feature (2)..(2): 2'-O-methyl Guanosine
  misc_feature (3)..(4): 2'-deoxy-2'-fluoro
  misc_feature (5)..(5): 2'-O-methyl Guanosine
  misc_feature (6)..(6): 2'-O-methyl Adenosine
  misc_feature (7)..(7): 2'-deoxy-2'-fluoro
  misc_feature (8)..(8): 2'-O-methyl Guanosine
  misc_feature (9)..(11): 2'-deoxy-2'-fluoro
  misc_feature (12)..(12): 2'-O-methyl Guanosine
  misc_feature (13)..(13): 2'-O-methyl Adenosine
  misc_feature (14)..(14): 2'-O-methyl Guanosine
  misc_feature (15)..(16): 2'-deoxy-2'-fluoro
  misc_feature (17)..(17): 2'-O-methyl Guanosine
  misc_feature (18)..(18): 2'-deoxy-2'-fluoro
  misc_feature (19)..(19): 2'-O-methyl Adenosine
  misc_feature (21)..(21): 3'-3 attached inverted deoxyabasic moiety.
cgccgaugcccgaguugcatt

SEQ ID NO: 3726 - DNA, 21 bp, Artificial Sequence
  Synthetic
  misc_feature (1)..(1): 5'-3 attached inverted deoxyabasic moiety.
  misc_feature (1)..(1): 2'-O-methyl Guanosine
  misc_feature (2)..(3): 2'-O-methyl Adenosine
  misc_feature (4)..(4): 2'-O-methyl Guanosine
  misc_feature (5)..(6): 2'-deoxy-2'-fluoro
  misc_feature (7)..(7): 2'-O-methyl Adenosine
  misc_feature (8)..(8): 2'-O-methyl Guanosine
  misc_feature (9)..(9): 2'-deoxy-2'-fluoro
  misc_feature (10)..(11): 2'-O-methyl Guanosine
  misc_feature (12)..(12): 2'-O-methyl Adenosine
  misc_feature (13)..(14): 2'-O-methyl Guanosine
  misc_feature (15)..(15): 2'-deoxy-2'-fluoro
  misc_feature (16)..(16): 2'-O-methyl Guanosine
  misc_feature (17)..(17): 2'-O-methyl Adenosine
  misc_feature (18)..(19): 2'-deoxy-2'-fluoro
  misc_feature (21)..(21): 3'-3 attached inverted deoxyabasic moiety.
gaagcuagcggaggugauutt

SEQ ID NO: 3727 - DNA, 21 bp, Artificial Sequence
  Synthetic
  misc_feature (1)..(1): 5'-3 attached inverted deoxyabasic moiety.
  misc_feature (1)..(1): 2'-deoxy-2'-fluoro
  misc_feature (2)..(3): 2'-O-methyl Guanosine
  misc_feature (4)..(7): 2'-deoxy-2'-fluoro
  misc_feature (8)..(8): 2'-O-methyl Adenosine
  misc_feature (9)..(9): 2'-O-methyl Guanosine
  misc_feature (10)..(12): 2'-O-methyl Adenosine
  misc_feature (13)..(13): 2'-O-methyl Guanosine
  misc_feature (14)..(15): 2'-O-methyl Adenosine
  misc_feature (16)..(16): 2'-deoxy-2'-fluoro
  misc_feature (17)..(17): 2'-O-methyl Adenosine
  misc_feature (18)..(18): 2'-O-methyl Guanosine
  misc_feature (19)..(19): 2'-deoxy-2'-fluoro
  misc_feature (21)..(21): 3'-3 attached inverted deoxyabasic moiety.
cggcccuagaaagaacagutt

SEQ ID NO: 3728 - DNA, 21 bp, Artificial Sequence
  Synthetic
  misc_feature (1)..(1): 5'-3 attached inverted deoxyabasic moiety.
  misc_feature (1)..(1): 2'-O-methyl Guanosine
  misc_feature (2)..(2): 2'-deoxy-2'-fluoro
  misc_feature (3)..(3): 2'-O-methyl Adenosine
  misc_feature (4)..(5): 2'-O-methyl Guanosine
  misc_feature (6)..(6): 2'-deoxy-2'-fluoro
  misc_feature (7)..(8): 2'-O-methyl Guanosine
  misc_feature (9)..(12): 2'-deoxy-2'-fluoro
  misc_feature (13)..(13): 2'-O-methyl Adenosine
  misc_feature (14)..(14): 2'-O-methyl Guanosine
  misc_feature (15)..(17): 2'-O-methyl Adenosine
  misc_feature (18)..(18): 2'-O-methyl Guanosine
  misc_feature (19)..(19): 2'-O-methyl Adenosine
  misc_feature (21)..(21): 3'-3 attached inverted deoxyabasic moiety.
gcaggcggcccuagaaagatt

SEQ ID NO: 3729 - DNA, 21 bp, Artificial Sequence
  Synthetic
  misc_feature (1)..(1): 5'-3 attached inverted deoxyabasic moiety.
  misc_feature (1)..(1): 2'-deoxy-2'-fluoro
  misc_feature (2)..(2): 2'-O-methyl Guanosine
  misc_feature (3)..(4): 2'-deoxy-2'-fluoro
  misc_feature (5)..(5): 2'-O-methyl Adenosine
  misc_feature (6)..(6): 2'-deoxy-2'-fluoro
  misc_feature (7)..(8): 2'-O-methyl Adenosine
  misc_feature (9)..(9): 2'-O-methyl Guanosine
  misc_feature (10)..(12): 2'-deoxy-2'-fluoro
  misc_feature (13)..(14): 2'-O-methyl Adenosine
  misc_feature (15)..(15): 2'-O-methyl Guanosine
  misc_feature (16)..(17): 2'-O-methyl Adenosine
  misc_feature (18)..(18): 2'-O-methyl Guanosine
  misc_feature (19)..(19): 2'-deoxy-2'-fluoro
  misc_feature (21)..(21): 3'-3 attached inverted deoxyabasic moiety.
cgcuauaagcccaagaagutt

SEQ ID NO: 3730 - DNA, 21 bp, Artificial Sequence
  Synthetic
  misc_feature (1)..(1): 5'-3 attached inverted deoxyabasic moiety.
  misc_feature (1)..(3): 2'-deoxy-2'-fluoro
  misc_feature (4)..(4): 2'-O-methyl Adenosine
  misc_feature (5)..(5): 2'-deoxy-2'-fluoro
  misc_feature (6)..(6): 2'-O-methyl Guanosine
  misc_feature (7)..(9): 2'-deoxy-2'-fluoro
  misc_feature (10)..(10): 2'-O-methyl Adenosine
  misc_feature (11)..(12): 2'-O-methyl Guanosine
  misc_feature (13)..(13): 2'-deoxy-2'-fluoro
  misc_feature (14)..(14): 2'-O-methyl Guanosine
  misc_feature (15)..(15): 2'-O-methyl Adenosine
  misc_feature (16)..(17): 2'-deoxy-2'-fluoro
  misc_feature (18)..(19): 2'-O-methyl Adenosine
  misc_feature (21)..(21): 3'-3 attached inverted deoxyabasic moiety.
cucacguccaggugaucaatt

SEQ ID NO: 3731 - DNA, 21 bp, Artificial Sequence
  Synthetic
  misc_feature (1)..(1): 2'-deoxy-2'-fluoro
  misc_feature (2)..(3): 2'-O-methyl Adenosine
  misc_feature (4)..(7): 2'-deoxy-2'-fluoro
  misc_feature (8)..(8): 2'-O-methyl Guanosine
  misc_feature (9)..(10): 2'-deoxy-2'-fluoro
  misc_feature (11)..(11): 2'-O-methyl Guanosine
  misc_feature (12)..(12): 2'-deoxy-2'-fluoro
  misc_feature (13)..(14): 2'-O-methyl Guanosine
  misc_feature (15)..(18): 2'-deoxy-2'-fluoro
  misc_feature (19)..(19): 2'-O-methyl Guanosine
  misc_feature (20)..(21): phosphorothioate linkage
uaauccugucgugguccugtt

SEQ ID NO: 3732 - DNA, 21 bp, Artificial Sequence
  Synthetic
  misc_feature (1)..(2): 2'-deoxy-2'-fluoro
  misc_feature (3)..(3): 2'-O-methyl Adenosine
  misc_feature (4)..(6): 2'-deoxy-2'-fluoro
  misc_feature (7)..(8): 2'-O-methyl Adenosine
  misc_feature (9)..(12): 2'-deoxy-2'-fluoro
  misc_feature (13)..(13): 2'-O-methyl Guanosine
  misc_feature (14)..(15): 2'-deoxy-2'-fluoro
  misc_feature (16)..(16): 2'-O-methyl Guanosine
  misc_feature (17)..(17): 2'-deoxy-2'-fluoro
  misc_feature (18)..(19): 2'-O-methyl Guanosine
  misc_feature (20)..(21): phosphorothioate linkage
ucacuuaauccugucguggtt

SEQ ID NO: 3733 - DNA, 21 bp, Artificial Sequence
  Synthetic
  misc_feature (1)..(1): 2'-deoxy-2'-fluoro
  misc_feature (2)..(2): 2'-O-methyl Guanosine
  misc_feature (3)..(3): 2'-deoxy-2'-fluoro
  misc_feature (4)..(5): 2'-O-methyl Adenosine
  misc_feature (6)..(8): 2'-deoxy-2'-fluoro
  misc_feature (9)..(11): 2'-O-methyl Guanosine
  misc_feature (12)..(12): 2'-deoxy-2'-fluoro
  misc_feature (13)..(13): 2'-O-methyl Adenosine
  misc_feature (14)..(15): 2'-deoxy-2'-fluoro
  misc_feature (16)..(17): 2'-O-methyl Guanosine
  misc_feature (18)..(18): 2'-deoxy-2'-fluoro
  misc_feature (19)..(19): 2'-O-methyl Guanosine
  misc_feature (20)..(21): phosphorothioate linkage
ugcaacucgggcaucggcgtt

SEQ ID NO: 3734 - DNA, 21 bp, Artificial Sequence
  Synthetic
  misc_feature (1)..(2): 2'-O-methyl Adenosine
  misc_feature (3)..(4): 2'-deoxy-2'-fluoro
  misc_feature (5)..(5): 2'-O-methyl Adenosine
  misc_feature (6)..(10): 2'-deoxy-2'-fluoro
  misc_feature (11)..(11): 2'-O-methyl Guanosine
  misc_feature (12)..(13): 2'-deoxy-2'-fluoro
  misc_feature (14)..(14): 2'-O-methyl Adenosine
  misc_feature (15)..(15): 2'-O-methyl Guanosine
  misc_feature (16)..(19): 2'-deoxy-2'-fluoro
  misc_feature (20)..(21): phosphorothioate linkage
aaucaccuccgcuagcuuctt

SEQ ID NO: 3735 - DNA, 21 bp, Artificial Sequence
  Synthetic
  misc_feature (1)..(1): 2'-O-methyl Adenosine
  misc_feature (2)..(3): 2'-deoxy-2'-fluoro
  misc_feature (4)..(4): 2'-O-methyl Guanosine
  misc_feature (5)..(12): 2'-deoxy-2'-fluoro
  misc_feature (13)..(13): 2'-O-methyl Adenosine
  misc_feature (14)..(16): 2'-O-methyl Guanosine
  misc_feature (17)..(18): 2'-deoxy-2'-fluoro
  misc_feature (19)..(19): 2'-O-methyl Guanosine
  misc_feature (20)..(21): phosphorothioate linkage
acuguucuuucuagggccgtt

SEQ ID NO: 3736 - DNA, 21 bp, Artificial Sequence
  Synthetic
  misc_feature (1)..(7): 2'-deoxy-2'-fluoro
  misc_feature (8)..(8): 2'-O-methyl Adenosine
  misc_feature (9)..(11): 2'-O-methyl Guanosine
  misc_feature (12)..(13): 2'-deoxy-2'-fluoro
  misc_feature (14)..(14): 2'-O-methyl Guanosine
  misc_feature (15)..(17): 2'-deoxy-2'-fluoro
  misc_feature (18)..(18): 2'-O-methyl Guanosine
  misc_feature (19)..(19): 2'-deoxy-2'-fluoro
  misc_feature (20)..(21): phosphorothioate linkage
ucuuucuagggccgccugctt

SEQ ID NO: 3737 - DNA, 21 bp, Artificial Sequence
  Synthetic
  misc_feature (1)..(1): 2'-O-methyl Adenosine
  misc_feature (2)..(7): 2'-deoxy-2'-fluoro
  misc_feature (8)..(10): 2'-O-methyl Guanosine
  misc_feature (11)..(13): 2'-deoxy-2'-fluoro
  misc_feature (14)..(14): 2'-O-methyl Adenosine
  misc_feature (15)..(15): 2'-deoxy-2'-fluoro
  misc_feature (16)..(16): 2'-O-methyl Adenosine
  misc_feature (17)..(17): 2'-O-methyl Guanosine
  misc_feature (18)..(18): 2'-deoxy-2'-fluoro
  misc_feature (19)..(19): 2'-O-methyl Guanosine
  misc_feature (20)..(21): phosphorothioate linkage
acuucuugggcuuauagcgtt

SEQ ID NO: 3738 - DNA, 21 bp, Artificial Sequence
  Synthetic
  misc_feature (1)..(2): 2'-deoxy-2'-fluoro
  misc_feature (3)..(3): 2'-O-methyl Guanosine
  misc_feature (4)..(4): 2'-O-methyl Adenosine
  misc_feature (5)..(6): 2'-deoxy-2'-fluoro
  misc_feature (7)..(7): 2'-O-methyl Adenosine
  misc_feature (8)..(10): 2'-deoxy-2'-fluoro
  misc_feature (11)..(12): 2'-O-methyl Guanosine
  misc_feature (13)..(13): 2'-O-methyl Adenosine
  misc_feature (14)..(14): 2'-deoxy-2'-fluoro
  misc_feature (15)..(15): 2'-O-methyl Guanosine
  misc_feature (16)..(16): 2'-deoxy-2'-fluoro
  misc_feature (17)..(17): 2'-O-methyl Guanosine
  misc_feature (18)..(18): 2'-O-methyl Adenosine
  misc_feature (19)..(19): 2'-O-methyl Guanosine
  misc_feature (20)..(21): phosphorothioate linkage
uugaucaccuggacgugagtt

SEQ ID NO: 3739 - DNA, 21 bp, Artificial Sequence
  Synthetic
  misc_feature (1)..(1): 5'-3 attached inverted deoxyabasic moiety.
  misc_feature (21)..(21): 3'-3 attached inverted deoxyabasic moiety.
caggaccacgacaggauuatt

SEQ ID NO: 3740 - DNA, 21 bp, Artificial Sequence
  Synthetic
  misc_feature (1)..(1): 5'-3 attached inverted deoxyabasic moiety.
  misc_feature (21)..(21): 3'-3 attached inverted deoxyabasic moiety.
ccacgacaggauuaagugatt

SEQ ID NO: 3741 - DNA, 21 bp, Artificial Sequence
  Synthetic
  misc_feature (1)..(1): 5'-3 attached inverted deoxyabasic moiety.
  misc_feature (21)..(21): 3'-3 attached inverted deoxyabasic moiety.
cgccgaugcccgaguugcatt

SEQ ID NO: 3742 - DNA, 21 bp, Artificial Sequence
  Synthetic
  misc_feature (1)..(1): 5'-3 attached inverted deoxyabasic moiety.
  misc_feature (21)..(21): 3'-3 attached inverted deoxyabasic moiety.
gaagcuagcggaggugauutt

SEQ ID NO: 3743 - DNA, 21 bp, Artificial Sequence
  Synthetic
  misc_feature (1)..(1): 5'-3 attached inverted deoxyabasic moiety.
  misc_feature (21)..(21): 3'-3 attached inverted deoxyabasic moiety.
cggcccuagaaagaacagutt

SEQ ID NO: 3744 - DNA, 21 bp, Artificial Sequence
  Synthetic
  misc_feature (1)..(1): 5'-3 attached inverted deoxyabasic moiety.
  misc_feature (21)..(21): 3'-3 attached inverted deoxyabasic moiety.
gcaggcggcccuagaaagatt

SEQ ID NO: 3745 - DNA, 21 bp, Artificial Sequence
  Synthetic
  misc_feature (1)..(1): 5'-3 attached inverted deoxyabasic moiety.
  misc_feature (21)..(21): 3'-3 attached inverted deoxyabasic moiety.
cgcuauaagcccaagaagutt

SEQ ID NO: 3746 - DNA, 21 bp, Artificial Sequence
  Synthetic
  misc_feature (1)..(1): 5'-3 attached inverted deoxyabasic moiety.
  misc_feature (21)..(21): 3'-3 attached inverted deoxyabasic moiety.
cucacguccaggugaucaatt

SEQ ID NO: 3747 - DNA, 21 bp, Artificial Sequence
  Synthetic
  misc_feature (20)..(21): phosphorothioate linkage
uaauccugucgugguccugtt

SEQ ID NO: 3748 - DNA, 21 bp, Artificial Sequence
  Synthetic
  misc_feature (20)..(21): phosphorothioate linkage
ucacuuaauccugucguggtt

SEQ ID NO: 3749 - DNA, 21 bp, Artificial Sequence
  Synthetic
  misc_feature (20)..(21): phosphorothioate linkage
ugcaacucgggcaucggcgtt

SEQ ID NO: 3750 - DNA, 21 bp, Artificial Sequence
  Synthetic
  misc_feature (20)..(21): phosphorothioate linkage
aaucaccuccgcuagcuuctt

SEQ ID NO: 3751 - DNA, 21 bp, Artificial Sequence
  Synthetic
  misc_feature (20)..(21): phosphorothioate linkage
acuguucuuucuagggccgtt

SEQ ID NO: 3752 - DNA, 21 bp, Artificial Sequence
  Synthetic
  misc_feature (20)..(21): phosphorothioate linkage
ucuuucuagggccgccugctt

SEQ ID NO: 3753 - DNA, 21 bp, Artificial Sequence
  Synthetic
  misc_feature (20)..(21): phosphorothioate linkage
acuucuugggcuuauagcgtt

SEQ ID NO: 3754 - DNA, 21 bp, Artificial Sequence
  Synthetic
  misc_feature (20)..(21): phosphorothioate linkage
uugaucaccuggacgugagtt

SEQ ID NO: 3755 - DNA, 21 bp, Artificial Sequence
  Synthetic
  misc_feature (1)..(1): 2'-deoxy-2'-fluoro
  misc_feature (2)..(3): 2'-O-methyl Adenosine
  misc_feature (4)..(7): 2'-deoxy-2'-fluoro
  misc_feature (8)..(8): 2'-O-methyl Guanosine
  misc_feature (9)..(10): 2'-deoxy-2'-fluoro
  misc_feature (11)..(11): 2'-O-methyl Guanosine
  misc_feature (12)..(12): 2'-deoxy-2'-fluoro
  misc_feature (13)..(14): 2'-O-methyl Guanosine
  misc_feature (15)..(18): 2'-deoxy-2'-fluoro
  misc_feature (19)..(19): 2'-O-methyl Guanosine
  misc_feature (21)..(21): 3'-3 attached inverted deoxyabasic moiety.
uaauccugucgugguccugtt

SEQ ID NO: 3756 - DNA, 21 bp, Artificial Sequence
  Synthetic
  misc_feature (1)..(2): 2'-deoxy-2'-fluoro
  misc_feature (3)..(3): 2'-O-methyl Adenosine
  misc_feature (4)..(6): 2'-deoxy-2'-fluoro
  misc_feature (7)..(8): 2'-O-methyl Adenosine
  misc_feature (9)..(12): 2'-deoxy-2'-fluoro
  misc_feature (13)..(13): 2'-O-methyl Guanosine
  misc_feature (14)..(15): 2'-deoxy-2'-fluoro
  misc_feature (16)..(16): 2'-O-methyl Guanosine
  misc_feature (17)..(17): 2'-deoxy-2'-fluoro
  misc_feature (18)..(19): 2'-O-methyl Guanosine
  misc_feature (21)..(21): 3'-3 attached inverted deoxyabasic moiety.
ucacuuaauccugucguggtt

SEQ ID NO: 3757 - DNA, 21 bp, Artificial Sequence
  Synthetic
  misc_feature (1)..(1): 2'-deoxy-2'-fluoro
  misc_feature (2)..(2): 2'-O-methyl Guanosine
  misc_feature (3)..(3): 2'-deoxy-2'-fluoro
  misc_feature (4)..(5): 2'-O-methyl Adenosine
  misc_feature (6)..(8): 2'-deoxy-2'-fluoro
  misc_feature (9)..(11): 2'-O-methyl Guanosine
  misc_feature (12)..(12): 2'-deoxy-2'-fluoro
  misc_feature (13)..(13): 2'-O-methyl Adenosine
  misc_feature (14)..(15): 2'-deoxy-2'-fluoro
  misc_feature (16)..(17): 2'-O-methyl Guanosine
  misc_feature (18)..(18): 2'-deoxy-2'-fluoro
  misc_feature (19)..(19): 2'-O-methyl Guanosine
  misc_feature (21)..(21): 3'-3 attached inverted deoxyabasic moiety.
ugcaacucgggcaucggcgtt

SEQ ID NO: 3758 - DNA, 21 bp, Artificial Sequence
  Synthetic
  misc_feature (1)..(2): 2'-O-methyl Adenosine
  misc_feature (3)..(4): 2'-deoxy-2'-fluoro
  misc_feature (5)..(5): 2'-O-methyl Adenosine
  misc_feature (6)..(10): 2'-deoxy-2'-fluoro
  misc_feature (11)..(11): 2'-O-methyl Guanosine
  misc_feature (12)..(13): 2'-deoxy-2'-fluoro
  misc_feature (14)..(14): 2'-O-methyl Adenosine
  misc_feature (15)..(15): 2'-O-methyl Guanosine
  misc_feature (16)..(19): 2'-deoxy-2'-fluoro
  misc_feature (21)..(21): 3'-3 attached inverted deoxyabasic moiety.
aaucaccuccgcuagcuuctt

SEQ ID NO: 3759 - DNA, 21 bp, Artificial Sequence
  Synthetic
  misc_feature (1)..(1): 2'-O-methyl Adenosine
  misc_feature (2)..(3): 2'-deoxy-2'-fluoro
  misc_feature (4)..(4): 2'-O-methyl Guanosine
  misc_feature (5)..(12): 2'-deoxy-2'-fluoro
  misc_feature (13)..(13): 2'-O-methyl Adenosine
  misc_feature (14)..(16): 2'-O-methyl Guanosine
  misc_feature (17)..(18): 2'-deoxy-2'-fluoro
  misc_feature (19)..(19): 2'-O-methy Guanosine
  misc_feature (21)..(21): 3'-3 attached inverted deoxyabasic moiety.
acuguucuuucuagggccgtt

SEQ ID NO: 3760 - DNA, 21 bp, Artificial Sequence
  Synthetic
  misc_feature (1)..(7): 2'-deoxy-2'-fluoro
  misc_feature (8)..(8): 2'-O-methyl Adenosine
  misc_feature (9)..(11): 2'-O-methyl Guanosine
  misc_feature (12)..(13): 2'-deoxy-2'-fluoro
  misc_feature (14)..(14): 2'-O-methyl Guanosine
  misc_feature (15)..(17): 2'-deoxy-2'-fluoro
  misc_feature (18)..(18): 2'-methyl Guanosine
  misc_feature (19)..(19): 2'-deoxy-2'-fluoro
  misc_feature (21)..(21): 3'-3 attached inverted deoxyabasic moiety.
ucuuucuagggccgccugctt

SEQ ID NO: 3761 - DNA, 21 bp, Artificial Sequence
  Synthetic
  misc_feature (1)..(1): 2'-O-methyl Adenosine
  misc_feature (2)..(7): 2'-deoxy-2'-fluoro
  misc_feature (8)..(10): 2'-O-methyl Guanosine
  misc_feature (11)..(13): 2'-deoxy-2'-fluoro
  misc_feature (14)..(14): 2'-O-methyl Adenosine
  misc_feature (15)..(15): 2'-deoxy-2'-fluoro
  misc_feature (16)..(16): 2'-O-methyl Adenosine
  misc_feature (17)..(17): 2'-O-methyl Guanosine
  misc_feature (18)..(18): 2'-deoxy-2'-fluoro
  misc_feature (19)..(19): 2'-O-methyl Guanosine
  misc_feature (21)..(21): 3'-3 attached inverted deoxyabasic moiety.
acuucuugggcuuauagcgtt

SEQ ID NO: 3762 - DNA, 21 bp, Artificial Sequence
  Synthetic
  misc_feature (1)..(2): 2'-deoxy-2'-fluoro
  misc_feature (3)..(3): 2'-O-methyl Guanosine
  misc_feature (4)..(4): 2'-O-methyl Adenosine
  misc_feature (5)..(6): 2'-deoxy-2'-fluoro
  misc_feature (7)..(7): 2'-O-methyl Adenosine
  misc_feature (8)..(10): 2'-deoxy-2'-fluoro
  misc_feature (11)..(12): 2'-O-methyl Guanosine
  misc_feature (13)..(13): 2'-O-methyl Adenosine
  misc_feature (14)..(14): 2'-deoxy-2'-fluoro
  misc_feature (15)..(15): 2'-O-methyl Guanosine
  misc_feature (16)..(16): 2'-deoxy-2'-fluoro
  misc_feature (17)..(17): 2'-O-methyl Guanosine
  misc_feature (18)..(18): 2'-O-methyl Adenosine
  misc_feature (19)..(19): 2'-O-methyl Guanosine
  misc_feature (21)..(21): 3'-3 attached inverted deoxyabasic moiety.
uugaucaccuggacgugagtt

SEQ ID NO: 3763 - DNA, 21 bp, Artificial Sequence
  Synthetic
  misc_feature (21)..(21): 3'-3 attached inverted deoxyabasic moiety.
uaauccugucgugguccugtt

SEQ ID NO: 3764 - DNA, 21 bp, Artificial Sequence
  Synthetic
  misc_feature (21)..(21): 3'-3 attached inverted deoxyabasic moiety.
ucacuuaauccugucguggtt

SEQ ID NO: 3765 - DNA, 21 bp, Artificial Sequence
  Synthetic
  misc_feature (21)..(21): 3'-3 attached inverted deoxyabasic moiety.
ugcaacucgggcaucggcgtt

SEQ ID NO: 3766 - DNA, 21 bp, Artificial Sequence
  Synthetic
  misc_feature (21)..(21): 3'-3 attached inverted deoxyabasic moiety.
aaucaccuccgcuagcuuctt

SEQ ID NO: 3767 - DNA, 21 bp, Artificial Sequence
  Synthetic
  misc_feature (21)..(21): 3'-3 attached inverted deoxyabasic moiety.
acuguucuuucuagggccgtt

SEQ ID NO: 3768 - DNA, 21 bp, Artificial Sequence
  Synthetic
  misc_feature (21)..(21): 3'-3 attached inverted deoxyabasic moiety.
ucuuucuagggccgccugctt

SEQ ID NO: 3769 - DNA, 21 bp, Artificial Sequence
  Synthetic
  misc_feature (21)..(21): 3'-3 attached inverted deoxyabasic moiety.
acuucuugggcuuauagcgtt

SEQ ID NO: 3770 - DNA, 21 bp, Artificial Sequence
  Synthetic
  misc_feature (21)..(21): 3'-3 attached inverted deoxyabasic moiety.
uugaucaccuggacgugagtt

SEQ ID NO: 3771 - DNA, 21 bp, Artificial Sequence
  Synthetic
  misc_feature (4)..(7): 2'-deoxy-2'-fluoro
  misc_feature (8)..(8): 2'-O-methyl Guanosine
  misc_feature (9)..(10): 2'-deoxy-2'-fluoro
  misc_feature (11)..(11): 2'-O-Guanosine
  misc_feature (12)..(12): 2'-deoxy-2'-fluoro
  misc_feature (13)..(14): 2'-O-methyl Guanosine
  misc_feature (15)..(18): 2'-deoxy-2'-fluoro
  misc_feature (19)..(19): 2'-O-methyl Guanosine
  misc_feature (20)..(21): phosphorothioate linkage
uaauccugucgugguccugtt

SEQ ID NO: 3772 - DNA, 21 bp, Artificial Sequence
  Synthetic
  misc_feature (4)..(6): 2'-deoxy-2'-fluoro
  misc_feature (7)..(8): 2'-O-methyl Adenosine
  misc_feature (9)..(12): 2'-deoxy-2'-fluoro
  misc_feature (13)..(13): 2'-O-methyl Guanosine
  misc_feature (14)..(15): 2'-deoxy-2'-fluoro
  misc_feature (16)..(16): 2'-O-methyl Guanosine
  misc_feature (17)..(17): 2'-deoxy-2'-fluoro
  misc_feature (18)..(19): 2'-O-methyl Guanosine
  misc_feature (20)..(21): phosphorothioate linkage
ucacuuaauccugucguggtt

SEQ ID NO: 3773 - DNA, 21 bp, Artificial Sequence
  Synthetic
  misc_feature (4)..(5): 2'-O-methyl Guanosine
  misc_feature (6)..(8): 2'-deoxy-2'-fluoro
  misc_feature (9)..(11): 2'-O-methyl Guanosine
  misc_feature (12)..(12): 2'-deoxy-2'-fluoro
  misc_feature (13)..(13): 2'-O-methyl Adenosine
  misc_feature (14)..(15): 2'-deoxy-2'-fluoro
  misc_feature (16)..(17): 2'-O-methyl Guanosine
  misc_feature (18)..(18): 2'-deoxy-2'-fluoro
  misc_feature (19)..(19): 2'-O-methyl Guanosine
  misc_feature (20)..(21): phosphorothioate linkage
ugcaacucgggcaucggcgtt

SEQ ID NO: 3774 - DNA, 21 bp, Artificial Sequence
  Synthetic
  misc_feature (4)..(4): 2'-deoxy-2'-fluoro
  misc_feature (5)..(5): 2'-O-methyl Adenosine
  misc_feature (6)..(10): 2'-deoxy-2'-fluoro
  misc_feature (11)..(11): 2'-O-methyl Guanosine
  misc_feature (12)..(13): 2'-deoxy-2'-fluoro
  misc_feature (14)..(14): 2'-O-methyl Adenosine
  misc_feature (15)..(15): 2'-O-methyl Guanosine
  misc_feature (16)..(19): 2'-deoxy-2'-fluoro
  misc_feature (20)..(21): phosphorothioate linkage
aaucaccuccgcuagcuuctt

SEQ ID NO: 3775 - DNA, 21 bp, Artificial Sequence
  Synthetic
  misc_feature (4)..(4): 2'-O-methyl Guanosine
  misc_feature (5)..(12): 2'-deoxy-2'-fluoro
  misc_feature (13)..(13): 2'-O-methyl Adenosine
  misc_feature (14)..(16): 2'-O-methyl Guanosine
  misc_feature (17)..(18): 2'-deoxy-2'-fluoro
  misc_feature (19)..(19): 2'-O-methyl Guanosine
  misc_feature (20)..(21): phosphorothioate linkage
acuguucuuucuagggccgtt

SEQ ID NO: 3776 - DNA, 21 bp, Artificial Sequence
  Synthetic
  misc_feature (4)..(7): 2'-deoxy-2'-fluoro
  misc_feature (8)..(8): 2'-O-methyl Adenosine
  misc_feature (9)..(11): 2'-O-methyl Guanosine
  misc_feature (12)..(13): 2'-deoxy-2'-fluoro
  misc_feature (14)..(14): 2'-O-methyl Guanosine
  misc_feature (15)..(17): 2'-deoxy-2'-fluoro
  misc_feature (18)..(18): 2'-O-methyl Guanosine
  misc_feature (19)..(19): 2'-deoxy-2'-fluoro
  misc_feature (20)..(21): phosphorothioate linkage
ucuuucuagggccgccugctt

SEQ ID NO: 3777 - DNA, 21 bp, Artificial Sequence
  Synthetic
  misc_feature (4)..(7): 2'-deoxy-2'-fluoro
  misc_feature (8)..(10): 2'-O-methyl Guanosine
  misc_feature (11)..(13): 2'-deoxy-2'-fluoro
  misc_feature (14)..(14): 2'-O-methyl Adenosine
  misc_feature (15)..(15): 2'-deoxy-2'-fluoro
  misc_feature (16)..(16): 2'-O-methyl Adenosine
  misc_feature (17)..(17): 2'-O-methyl Guanosine
  misc_feature (18)..(18): 2'-deoxy-2'-fluoro
  misc_feature (19)..(19): 2'-O-methyl Guanosine
  misc_feature (20)..(21): phosphorothioate linkage
acuucuugggcuuauagcgtt

SEQ ID NO: 3778 - DNA, 21 bp, Artificial Sequence
  Synthetic
  misc_feature (4)..(4): 2'-O-methyl Adenosine
  misc_feature (5)..(6): 2'-deoxy-2'-fluoro
  misc_feature (7)..(7): 2'-O-methyl Adenosine
  misc_feature (8)..(10): 2'-deoxy-2'-fluoro
  misc_feature (11)..(12): 2'-O-methyl Guanosine
  misc_feature (13)..(13): 2'-O-methyl Adenosine
  misc_feature (14)..(14): 2'-deoxy-2'-fluoro
  misc_feature (15)..(15): 2'-O-methyl Guanosine
  misc_feature (16)..(16): 2'-deoxy-2'-fluoro
  misc_feature (17)..(17): 2'-O-methyl Guanosine
  misc_feature (18)..(18): 2'-O-methyl Adenosine
  misc_feature (19)..(19): 2'-O-methyl Guanosine
  misc_feature (20)..(21): phosphorothioate linkage
uugaucaccuggacgugagtt

SEQ ID NO: 3779 - RNA, 19 nt, Artificial Sequence
  Synthetic
cagaucuggaagguggcug

SEQ ID NO: 3780 - RNA, 19 nt, Artificial Sequence
  Synthetic
gcggaacgguuuuaagcgg

SEQ ID NO: 3781 - RNA, 19 nt, Artificial Sequence
  Synthetic
gaagauggaggagccggag

SEQ ID NO: 3782 - RNA, 19 nt, Artificial Sequence
  Synthetic
ggaaccggcggacaguggg

SEQ ID NO: 3783 - RNA, 19 nt, Artificial Sequence
  Synthetic
gcagucgcuggucccgguu

SEQ ID NO: 3784 - RNA, 19 nt, Artificial Sequence
  Synthetic
uuauaucuauagucccgag

SEQ ID NO: 3785 - RNA, 19 nt, Artificial Sequence
  Synthetic
guaugucaguaugugugac

SEQ ID NO: 3786 - RNA, 19 nt, Artificial Sequence
  Synthetic
cucccuggccaagaucccc

SEQ ID NO: 3787 - RNA, 19 nt, Artificial Sequence
  Synthetic
caaacgggccaguauggug

SEQ ID NO: 3788 - RNA, 19 nt, Artificial Sequence
  Synthetic
gcauucuuugauugaagca

SEQ ID NO: 3789 - RNA, 19 nt, Artificial Sequence
  Synthetic
auaugcacugcauaagcag

SEQ ID NO: 3790 - RNA, 19 nt, Artificial Sequence
  Synthetic
gaugaggauaguuaagccu

SEQ ID NO: 3791 - RNA, 19 nt, Artificial Sequence
  Synthetic
uaaaguggccuccauggag

SEQ ID NO: 3792 - RNA, 19 nt, Artificial Sequence
  Synthetic
ggagauggccaccuuccac

SEQ ID NO: 3793 - RNA, 19 nt, Artificial Sequence
  Synthetic
cacugaugcuuaucugcag

SEQ ID NO: 3794 - RNA, 19 nt, Artificial Sequence
  Synthetic
gcaucuccagaaggucagc

SEQ ID NO: 3795 - RNA, 19 nt, Artificial Sequence
  Synthetic
ccaagagggcgaugaugau

SEQ ID NO: 3796 - RNA, 19 nt, Artificial Sequence
  Synthetic
ucauccggacuccauagaa

SEQ ID NO: 3797 - RNA, 19 nt, Artificial Sequence
  Synthetic
auaugggcuagguuaugac

SEQ ID NO: 3798 - RNA, 19 nt, Artificial Sequence
  Synthetic
cugcccagccacugaaggg

SEQ ID NO: 3799 - RNA, 19 nt, Artificial Sequence
  Synthetic
gauauuugacuaugcagca

SEQ ID NO: 3800 - RNA, 19 nt, Artificial Sequence
  Synthetic
agcuauaggaggggcuacg

SEQ ID NO: 3801 - RNA, 19 nt, Artificial Sequence
  Synthetic
gaucacagcugcccaaugc

SEQ ID NO: 3802 - RNA, 19 nt, Artificial Sequence
  Synthetic
ccugauugacggaaugugc

SEQ ID NO: 3803 - RNA, 19 nt, Artificial Sequence
  Synthetic
caaaguagcaauuaacugg

SEQ ID NO: 3804 - RNA, 19 nt, Artificial Sequence
  Synthetic
gucuggaggguggcaucau

SEQ ID NO: 3805 - RNA, 19 nt, Artificial Sequence
  Synthetic
ugcaaagaaagaugaagca

SEQ ID NO: 3806 - RNA, 19 nt, Artificial Sequence
  Synthetic
aucugguuuuuguuaucuc

SEQ ID NO: 3807 - RNA, 19 nt, Artificial Sequence
  Synthetic
caaugaugcuguccuggga

SEQ ID NO: 3808 - RNA, 19 nt, Artificial Sequence
  Synthetic
aauauuacgauugcgacgg

SEQ ID NO: 3809 - RNA, 19 nt, Artificial Sequence
  Synthetic
gaaauuugagcguauucuc

SEQ ID NO: 3810 - RNA, 19 nt, Artificial Sequence
  Synthetic
cuacguggauuuggaucug

SEQ ID NO: 3811 - RNA, 19 nt, Artificial Sequence
  Synthetic
gcaccauggagauggugua

SEQ ID NO: 3812 - RNA, 19 nt, Artificial Sequence
  Synthetic
agaagacgcauucaguuuc

SEQ ID NO: 3813 - RNA, 19 nt, Artificial Sequence
  Synthetic
caccuccaaagucaugacc

SEQ ID NO: 3814 - RNA, 19 nt, Artificial Sequence
  Synthetic
cgugucccugcacaaauuc

SEQ ID NO: 3815 - RNA, 19 nt, Artificial Sequence
  Synthetic
cuccccaggauuuuuccca

SEQ ID NO: 3816 - RNA, 19 nt, Artificial Sequence
  Synthetic
aggaacaggugacgugucu

SEQ ID NO: 3817 - RNA, 19 nt, Artificial Sequence
  Synthetic
ugauguuggccuagggaag

SEQ ID NO: 3818 - RNA, 19 nt, Artificial Sequence
  Synthetic
gggacgguacuacagugua

SEQ ID NO: 3819 - RNA, 19 nt, Artificial Sequence
  Synthetic
aaaugugcccauucaggau

SEQ ID NO: 3820 - RNA, 19 nt, Artificial Sequence
  Synthetic
uggcauacaagaugaaaaa

SEQ ID NO: 3821 - RNA, 19 nt, Artificial Sequence
  Synthetic
auauuaccagaucugugaa

SEQ ID NO: 3822 - RNA, 19 nt, Artificial Sequence
  Synthetic
aaguguacuaaaggaagua

SEQ ID NO: 3823 - RNA, 19 nt, Artificial Sequence
  Synthetic
auaccaagccuuuaauccc

SEQ ID NO: 3824 - RNA, 19 nt, Artificial Sequence
  Synthetic
caaagcaguggucuuacag

SEQ ID NO: 3825 - RNA, 19 nt, Artificial Sequence
  Synthetic
gcugggagcugacacaaua

SEQ ID NO: 3826 - RNA, 19 nt, Artificial Sequence
  Synthetic
agcuggggaucccaugugc

SEQ ID NO: 3827 - RNA, 19 nt, Artificial Sequence
  Synthetic
cuccuuuaacaugacucca

SEQ ID NO: 3828 - RNA, 19 nt, Artificial Sequence
  Synthetic
agugggaauuggcaagugu

SEQ ID NO: 3829 - RNA, 19 nt, Artificial Sequence
  Synthetic
ucuuaaguacauccuucaa

SEQ ID NO: 3830 - RNA, 19 nt, Artificial Sequence
  Synthetic
auggcaguuggcaacacuc

SEQ ID NO: 3831 - RNA, 19 nt, Artificial Sequence
  Synthetic
cauuuugggaggaggaggc

SEQ ID NO: 3832 - RNA, 19 nt, Artificial Sequence
  Synthetic
cuauaaccuugccaacacg

SEQ ID NO: 3833 - RNA, 19 nt, Artificial Sequence
  Synthetic
ggcucgaugcuggacauac

SEQ ID NO: 3834 - RNA, 19 nt, Artificial Sequence
  Synthetic
cuugaccggggucauccua

SEQ ID NO: 3835 - RNA, 19 nt, Artificial Sequence
  Synthetic
agggaaaacacuauccucu

SEQ ID NO: 3836 - RNA, 19 nt, Artificial Sequence
  Synthetic
ugagaucccagaucaugag

SEQ ID NO: 3837 - RNA, 19 nt, Artificial Sequence
  Synthetic
guuuuucacagcauauggu

SEQ ID NO: 3838 - RNA, 19 nt, Artificial Sequence
  Synthetic
uccugauuaugugcuggaa

SEQ ID NO: 3839 - RNA, 19 nt, Artificial Sequence
  Synthetic
aaucacgccaagcugccgg

SEQ ID NO: 3840 - RNA, 19 nt, Artificial Sequence
  Synthetic
gccagaccgcaaugagccc

SEQ ID NO: 3841 - RNA, 19 nt, Artificial Sequence
  Synthetic
ccaccgaauccaacaaauc

SEQ ID NO: 3842 - RNA, 19 nt, Artificial Sequence
  Synthetic
ccucaacuacaucaaaggg

SEQ ID NO: 3843 - RNA, 19 nt, Artificial Sequence
  Synthetic
gaaucugaagcaugugguc

SEQ ID NO: 3844 - RNA, 19 nt, Artificial Sequence
  Synthetic
cuaguugacagaaagagau

SEQ ID NO: 3845 - RNA, 19 nt, Artificial Sequence
  Synthetic
ucagguuuccagagcugag

SEQ ID NO: 3846 - RNA, 19 nt, Artificial Sequence
  Synthetic
ggaguggugccuauaauga

SEQ ID NO: 3847 - RNA, 19 nt, Artificial Sequence
  Synthetic
aagacagcguguuuaugca

SEQ ID NO: 3848 - RNA, 19 nt, Artificial Sequence
  Synthetic
aagcaguuuguggaauuug

SEQ ID NO: 3849 - RNA, 19 nt, Artificial Sequence
  Synthetic
gugacugcagggaaaauuu

SEQ ID NO: 3850 - RNA, 19 nt, Artificial Sequence
  Synthetic
ugaaagaaauuacuuccug

SEQ ID NO: 3851 - RNA, 19 nt, Artificial Sequence
  Synthetic
gaaaauuuccaaggggcau

SEQ ID NO: 3852 - RNA, 19 nt, Artificial Sequence
  Synthetic
ucaaguggcagcuggcuuc

SEQ ID NO: 3853 - RNA, 19 nt, Artificial Sequence
  Synthetic
ccuggggugaagaggcagg

SEQ ID NO: 3854 - RNA, 19 nt, Artificial Sequence
  Synthetic
gcaccccagaguccucaac

SEQ ID NO: 3855 - RNA, 19 nt, Artificial Sequence
  Synthetic
cuggaccuaggggaagaag

SEQ ID NO: 3856 - RNA, 19 nt, Artificial Sequence
  Synthetic
ggagauaucccacauuuaa

SEQ ID NO: 3857 - RNA, 19 nt, Artificial Sequence
  Synthetic
aaguucuuauuuaaaaaaa

SEQ ID NO: 3858 - RNA, 19 nt, Artificial Sequence
  Synthetic
acacacacacacaaaugaa

SEQ ID NO: 3859 - RNA, 19 nt, Artificial Sequence
  Synthetic
aauuuuuaaucuuugaaaa

SEQ ID NO: 3860 - RNA, 19 nt, Artificial Sequence
  Synthetic
auuauuuuuaagcgaauug

SEQ ID NO: 3861 - RNA, 19 nt, Artificial Sequence
  Synthetic
ggggaggggaguauuuuaa

SEQ ID NO: 3862 - RNA, 19 nt, Artificial Sequence
  Synthetic
aucaucuuaaaugaaacag

SEQ ID NO: 3863 - RNA, 19 nt, Artificial Sequence
  Synthetic
gaucagaagcuggaugaga

SEQ ID NO: 3864 - RNA, 19 nt, Artificial Sequence
  Synthetic
agcagucaccaguuuguag

SEQ ID NO: 3865 - RNA, 19 nt, Artificial Sequence
  Synthetic
gggcaggaggcagcugaga

SEQ ID NO: 3866 - RNA, 19 nt, Artificial Sequence
  Synthetic
aggcaggguuugggccuca

SEQ ID NO: 3867 - RNA, 19 nt, Artificial Sequence
  Synthetic
aggaccauccagguggagc

SEQ ID NO: 3868 - RNA, 19 nt, Artificial Sequence
  Synthetic
cccugggagagaggguacu

SEQ ID NO: 3869 - RNA, 19 nt, Artificial Sequence
  Synthetic
ugaucagcagacugggagg

SEQ ID NO: 3870 - RNA, 19 nt, Artificial Sequence
  Synthetic
guggggagaaguccgcugg

SEQ ID NO: 3871 - RNA, 19 nt, Artificial Sequence
  Synthetic
guguuguuuuaguguuaua

SEQ ID NO: 3872 - RNA, 19 nt, Artificial Sequence
  Synthetic
auaucuuugguuuuuuuaa

SEQ ID NO: 3873 - RNA, 19 nt, Artificial Sequence
  Synthetic
auaaaaucuuugaaaaccu

SEQ ID NO: 3874 - RNA, 19 nt, Artificial Sequence
  Synthetic
uaaaaaaaaaaaaaaaaaa

SEQ ID NO: 3875 - RNA, 19 nt, Artificial Sequence
  Synthetic
cagccaccuuccagaucug

SEQ ID NO: 3876 - RNA, 19 nt, Artificial Sequence
  Synthetic
ccgcuuaaaaccguuccgc

SEQ ID NO: 3877 - RNA, 19 nt, Artificial Sequence
  Synthetic
cuccggcuccuccaucuuc

SEQ ID NO: 3878 - RNA, 19 nt, Artificial Sequence
  Synthetic
cccacuguccgccgguucc

SEQ ID NO: 3879 - RNA, 19 nt, Artificial Sequence
  Synthetic
aaccgggaccagcgacugc

SEQ ID NO: 3880 - RNA, 19 nt, Artificial Sequence
  Synthetic
cucgggacuauagauauaa

SEQ ID NO: 3881 - RNA, 19 nt, Artificial Sequence
  Synthetic
gucacacauacugacauac

SEQ ID NO: 3882 - RNA, 19 nt, Artificial Sequence
  Synthetic
ggggaucuuggccagggag

SEQ ID NO: 3883 - RNA, 19 nt, Artificial Sequence
  Synthetic
caccauacuggcccguuug

SEQ ID NO: 3884 - RNA, 19 nt, Artificial Sequence
  Synthetic
ugcuucaaucaaagaaugc

SEQ ID NO: 3885 - RNA, 19 nt, Artificial Sequence
  Synthetic
cugcuuaugcagugcauau

SEQ ID NO: 3886 - RNA, 19 nt, Artificial Sequence
  Synthetic
aggcuuaacuauccucauc

SEQ ID NO: 3887 - RNA, 19 nt, Artificial Sequence
  Synthetic
cuccauggaggccacuuua

SEQ ID NO: 3888 - RNA, 19 nt, Artificial Sequence
  Synthetic
guggaagguggccaucucc

SEQ ID NO: 3889 - RNA, 19 nt, Artificial Sequence
  Synthetic
cugcagauaagcaucagug

SEQ ID NO: 3890 - RNA, 19 nt, Artificial Sequence
  Synthetic
gcugaccuucuggagaugc

SEQ ID NO: 3891 - RNA, 19 nt, Artificial Sequence
  Synthetic
aucaucaucgcccucuugg

SEQ ID NO: 3892 - RNA, 19 nt, Artificial Sequence
  Synthetic
uucuauggaguccggauga

SEQ ID NO: 3893 - RNA, 19 nt, Artificial Sequence
  Synthetic
gucauaaccuagcccauau

SEQ ID NO: 3894 - RNA, 19 nt, Artificial Sequence
  Synthetic
cccuucaguggcugggcag

SEQ ID NO: 3895 - RNA, 19 nt, Artificial Sequence
  Synthetic
ugcugcauagucaaauauc

SEQ ID NO: 3896 - RNA, 19 nt, Artificial Sequence
  Synthetic
cguagccccuccuauagcu

SEQ ID NO: 3897 - RNA, 19 nt, Artificial Sequence
  Synthetic
gcauugggcagcugugauc

SEQ ID NO: 3898 - RNA, 19 nt, Artificial Sequence
  Synthetic
gcacauuccgucaaucagg

SEQ ID NO: 3899 - RNA, 19 nt, Artificial Sequence
  Synthetic
ccaguuaauugcuacuuug

SEQ ID NO: 3900 - RNA, 19 nt, Artificial Sequence
  Synthetic
augaugccacccuccagac

SEQ ID NO: 3901 - RNA, 19 nt, Artificial Sequence
  Synthetic
ugcuucaucuuucuuugca

SEQ ID NO: 3902 - RNA, 19 nt, Artificial Sequence
  Synthetic
gagauaacaaaaaccagau

SEQ ID NO: 3903 - RNA, 19 nt, Artificial Sequence
  Synthetic
ucccaggacagcaucauug

SEQ ID NO: 3904 - RNA, 19 nt, Artificial Sequence
  Synthetic
ccgucgcaaucguaauauu

SEQ ID NO: 3905 - RNA, 19 nt, Artificial Sequence
  Synthetic
gagaauacgcucaaauuuc

SEQ ID NO: 3906 - RNA, 19 nt, Artificial Sequence
  Synthetic
cagauccaaauccacguag

SEQ ID NO: 3907 - RNA, 19 nt, Artificial Sequence
  Synthetic
uacaccaucuccauggugc

SEQ ID NO: 3908 - RNA, 19 nt, Artificial Sequence
  Synthetic
gaaacugaaugcgucuucu

SEQ ID NO: 3909 - RNA, 19 nt, Artificial Sequence
  Synthetic
ggucaugacuuuggaggug

SEQ ID NO: 3910 - RNA, 19 nt, Artificial Sequence
  Synthetic
gaauuugugcagggacacg

SEQ ID NO: 3911 - RNA, 19 nt, Artificial Sequence
  Synthetic
ugggaaaaauccuggggag

SEQ ID NO: 3912 - RNA, 19 nt, Artificial Sequence
  Synthetic
agacacgucaccuguuccu

SEQ ID NO: 3913 - RNA, 19 nt, Artificial Sequence
  Synthetic
cuucccuaggccaacauca

SEQ ID NO: 3914 - RNA, 19 nt, Artificial Sequence
  Synthetic
uacacuguaguaccguccc

SEQ ID NO: 3915 - RNA, 19 nt, Artificial Sequence
  Synthetic
auccugaaugggcacauuu

SEQ ID NO: 3916 - RNA, 19 nt, Artificial Sequence
  Synthetic
uuuuucaucuuguaugcca

SEQ ID NO: 3917 - RNA, 19 nt, Artificial Sequence
  Synthetic
uucacagaucugguaauau

SEQ ID NO: 3918 - RNA, 19 nt, Artificial Sequence
  Synthetic
uacuuccuuuaguacacuu

SEQ ID NO: 3919 - RNA, 19 nt, Artificial Sequence
  Synthetic
gggauuaaaggcuugguau

SEQ ID NO: 3920 - RNA, 19 nt, Artificial Sequence
  Synthetic
cuguaagaccacugcuuug

SEQ ID NO: 3921 - RNA, 19 nt, Artificial Sequence
  Synthetic
uauugugucagcucccagc

SEQ ID NO: 3922 - RNA, 19 nt, Artificial Sequence
  Synthetic
gcacaugggauccccagcu

SEQ ID NO: 3923 - RNA, 19 nt, Artificial Sequence
  Synthetic
uggagucauguuaaaggag

SEQ ID NO: 3924 - RNA, 19 nt, Artificial Sequence
  Synthetic
acacuugccaauucccacu

SEQ ID NO: 3925 - RNA, 19 nt, Artificial Sequence
  Synthetic
uugaaggauguacuuaaga

SEQ ID NO: 3926 - RNA, 19 nt, Artificial Sequence
  Synthetic
gaguguugccaacugccau

SEQ ID NO: 3927 - RNA, 19 nt, Artificial Sequence
  Synthetic
gccuccuccucccaaaaug

SEQ ID NO: 3928 - RNA, 19 nt, Artificial Sequence
  Synthetic
cguguuggcaagguuauag

SEQ ID NO: 3929 - RNA, 19 nt, Artificial Sequence
  Synthetic
guauguccagcaucgagcc

SEQ ID NO: 3930 - RNA, 19 nt, Artificial Sequence
  Synthetic
uaggaugaccccggucaag

SEQ ID NO: 3931 - RNA, 19 nt, Artificial Sequence
  Synthetic
agaggauaguguuuucccu

SEQ ID NO: 3932 - RNA, 19 nt, Artificial Sequence
  Synthetic
cucaugaucugggaucuca

SEQ ID NO: 3933 - RNA, 19 nt, Artificial Sequence
  Synthetic
accauaugcugugaaaaac

SEQ ID NO: 3934 - RNA, 19 nt, Artificial Sequence
  Synthetic
uuccagcacauaaucagga

SEQ ID NO: 3935 - RNA, 19 nt, Artificial Sequence
  Synthetic
ccggcagcuuggcgugauu

SEQ ID NO: 3936 - RNA, 19 nt, Artificial Sequence
  Synthetic
gggcucauugcggucuggc

SEQ ID NO: 3937 - RNA, 19 nt, Artificial Sequence
  Synthetic
gauuuguuggauucggugg

SEQ ID NO: 3938 - RNA, 19 nt, Artificial Sequence
  Synthetic
cccuuugauguaguugagg

SEQ ID NO: 3939 - RNA, 19 nt, Artificial Sequence
  Synthetic
gaccacaugcuucagauuc

SEQ ID NO: 3940 - RNA, 19 nt, Artificial Sequence
  Synthetic
aucucuuucugucaacuag

SEQ ID NO: 3941 - RNA, 19 nt, Artificial Sequence
  Synthetic
cucagcucuggaaaccuga

SEQ ID NO: 3942 - RNA, 19 nt, Artificial Sequence
  Synthetic
ucauuauaggcaccacucc

SEQ ID NO: 3943 - RNA, 19 nt, Artificial Sequence
  Synthetic
ugcauaaacacgcugucuu

SEQ ID NO: 3944 - RNA, 19 nt, Artificial Sequence
  Synthetic
caaauuccacaaacugcuu

SEQ ID NO: 3945 - RNA, 19 nt, Artificial Sequence
  Synthetic
aaauuuucccugcagucac

SEQ ID NO: 3946 - RNA, 19 nt, Artificial Sequence
  Synthetic
caggaaguaauuucuuuca

SEQ ID NO: 3947 - RNA, 19 nt, Artificial Sequence
  Synthetic
augccccuuggaaauuuuc

SEQ ID NO: 3948 - RNA, 19 nt, Artificial Sequence
  Synthetic
gaagccagcugccacuuga

SEQ ID NO: 3949 - RNA, 19 nt, Artificial Sequence
  Synthetic
ccugccucuucaccccagg

SEQ ID NO: 3950 - RNA, 19 nt, Artificial Sequence
  Synthetic
guugaggacucuggggugc

SEQ ID NO: 3951 - RNA, 19 nt, Artificial Sequence
  Synthetic
cuucuuccccuagguccag

SEQ ID NO: 3952 - RNA, 19 nt, Artificial Sequence
  Synthetic
uuaaaugugggauaucucc

SEQ ID NO: 3953 - RNA, 19 nt, Artificial Sequence
  Synthetic
uuuuuuuaaauaagaacuu

SEQ ID NO: 3954 - RNA, 19 nt, Artificial Sequence
  Synthetic
uucauuugugugugugugu

SEQ ID NO: 3955 - RNA, 19 nt, Artificial Sequence
  Synthetic
uuuucaaagauuaaaaauu

SEQ ID NO: 3956 - RNA, 19 nt, Artificial Sequence
  Synthetic
caauucgcuuaaaaauaau

SEQ ID NO: 3957 - RNA, 19 nt, Artificial Sequence
  Synthetic
uuaaaauacuccccucccc

SEQ ID NO: 3958 - RNA, 19 nt, Artificial Sequence
  Synthetic
cuguuucauuuaagaugau

SEQ ID NO: 3959 - RNA, 19 nt, Artificial Sequence
  Synthetic
ucucauccagcuucugauc

SEQ ID NO: 3960 - RNA, 19 nt, Artificial Sequence
  Synthetic
cuacaaacuggugacugcu

SEQ ID NO: 3961 - RNA, 19 nt, Artificial Sequence
  Synthetic
ucucagcugccuccugccc

SEQ ID NO: 3962 - RNA, 19 nt, Artificial Sequence
  Synthetic
ugaggcccaaacccugccu

SEQ ID NO: 3963 - RNA, 19 nt, Artificial Sequence
  Synthetic
gcuccaccuggaugguccu

SEQ ID NO: 3964 - RNA, 19 nt, Artificial Sequence
  Synthetic
aguacccucucucccaggg

SEQ ID NO: 3965 - RNA, 19 nt, Artificial Sequence
  Synthetic
ccucccagucugcugauca

SEQ ID NO: 3966 - RNA, 19 nt, Artificial Sequence
  Synthetic
ccagcggacuucuccccac

SEQ ID NO: 3967 - RNA, 19 nt, Artificial Sequence
  Synthetic
uauaacacuaaaacaacac

SEQ ID NO: 3968 - RNA, 19 nt, Artificial Sequence
  Synthetic
uuaaaaaaaccaaagauau

SEQ ID NO: 3969 - RNA, 19 nt, Artificial Sequence
  Synthetic
agguuuucaaagauuuuau

SEQ ID NO: 3970 - RNA, 19 nt, Artificial Sequence
  Synthetic
uuuuuuuuuuuuuuuuuua

SEQ ID NO: 3971 - RNA, 23 nt, Artificial Sequence
  Synthetic
cuggucccgguuuauaucuauag

SEQ ID NO: 3972 - RNA, 23 nt, Artificial Sequence
  Synthetic
ugggaauuggcaagugucuuaag

SEQ ID NO: 3973 - RNA, 23 nt, Artificial Sequence
  Synthetic
gccugauugacggaaugugcaaa

SEQ ID NO: 3974 - RNA, 23 nt, Artificial Sequence
  Synthetic
gacggaaugugcaaaguagcaau

SEQ ID NO: 3975 - RNA, 23 nt, Artificial Sequence
  Synthetic
auggcaguuggcaacacucauuu

SEQ ID NO: 3976 - RNA, 23 nt, Artificial Sequence
  Synthetic
acgauugcgacggaaauuugagc

SEQ ID NO: 3977 - RNA, 23 nt, Artificial Sequence
  Synthetic
acggaaauuugagcguauucucu

SEQ ID NO: 3978 - RNA, 23 nt, Artificial Sequence
  Synthetic
gcguauucucuacguggauuugg

SEQ ID NO: 3979 - DNA, 21 bp, Artificial Sequence
  Synthetic
ggucccgguuuauaucuautt

SEQ ID NO: 3980 - DNA, 21 bp, Artificial Sequence
  Synthetic
ggaauuggcaagugucuuatt

SEQ ID NO: 3981 - DNA, 21 bp, Artificial Sequence
  Synthetic
cugauugacggaaugugcatt

SEQ ID NO: 3982 - DNA, 21 bp, Artificial Sequence
  Synthetic
cggaaugugcaaaguagcatt

SEQ ID NO: 3983 - DNA, 21 bp, Artificial Sequence
  Synthetic
ggcaguuggcaacacucautt

SEQ ID NO: 3984 - DNA, 21 bp, Artificial Sequence
  Synthetic
gauugcgacggaaauuugatt

SEQ ID NO: 3985 - DNA, 21 bp, Artificial Sequence
  Synthetic
ggaaauuugagcguauucutt

SEQ ID NO: 3986 - DNA, 21 bp, Artificial Sequence
  Synthetic
guauucucuacguggauuutt

SEQ ID NO: 3987 - DNA, 21 bp, Artificial Sequence
  Synthetic
auagauauaaaccgggacctt

SEQ ID NO: 3988 - DNA, 21 bp, Artificial Sequence
  Synthetic
uaagacacuugccaauucctt

SEQ ID NO: 3989 - DNA, 21 bp, Artificial Sequence
  Synthetic
ugcacauuccgucaaucagtt

SEQ ID NO: 3990 - DNA, 21 bp, Artificial Sequence
  Synthetic
ugcuacuuugcacauuccgtt

SEQ ID NO: 3991 - DNA, 21 bp, Artificial Sequence
  Synthetic
augaguguugccaacugcctt

SEQ ID NO: 3992 - DNA, 21 bp, Artificial Sequence
  Synthetic
ucaaauuuccgucgcaauctt

SEQ ID NO: 3993 - DNA, 21 bp, Artificial Sequence
  Synthetic
agaauacgcucaaauuucctt

SEQ ID NO: 3994 - DNA, 21 bp, Artificial Sequence
  Synthetic
aaauccacguagagaauactt

SEQ ID NO: 3995 - DNA, 21 bp, Artificial Sequence
  Synthetic
  misc_feature (1)..(1): 5'-3 attached inverted deoxyabasic moiety.
  misc_feature (3)..(6): 2'-deoxy-2'-fluoro
  misc_feature (9)..(11): 2'-deoxy-2'-fluoro
  misc_feature (13)..(13): 2'-deoxy-2'-fluoro
  misc_feature (15)..(17): 2'-deoxy-2'-fluoro
  misc_feature (19)..(19): 2'-deoxy-2'-fluoro
  misc_feature (21)..(21): 3'-3 attached inverted deoxyabasic moiety.
ggucccgguuuauaucuautt

SEQ ID NO: 3996 - DNA, 21 bp, Artificial Sequence
  Synthetic
  misc_feature (1)..(1): 5'-3 attached inverted deoxyabasic moiety.
  misc_feature (5)..(6): 2'-deoxy-2'-fluoro
  misc_feature (9)..(9): 2'-deoxy-2'-fluoro
  misc_feature (13)..(13): 2'-deoxy-2'-fluoro
  misc_feature (15)..(18): 2'-deoxy-2'-fluoro
  misc_feature (21)..(21): 3'-3 attached inverted deoxyabasic moiety.
ggaauuggcaagugucuuatt

SEQ ID NO: 3997 - DNA, 21 bp, Artificial Sequence
  Synthetic
  misc_feature (1)..(1): 5'-3 attached inverted deoxyabasic moiety.
  misc_feature (1)..(2): 2'deoxy-2'-fluoro
  misc_feature (5)..(6): 2'deoxy-2'-fluoro
  misc_feature (9)..(9): 2'deoxy-2'-fluoro
  misc_feature (14)..(14): 2'deoxy-2'-fluoro
  misc_feature (16)..(16): 2'deoxy-2'-fluoro
  misc_feature (18)..(18): 2'deoxy-2'-fluoro
  misc_feature (21)..(21): 3'-3 attached inverted deoxyabasic moiety.
cugauugacggaaugugcatt

SEQ ID NO: 3998 - DNA, 21 bp, Artificial Sequence
  Synthetic
  misc_feature (1)..(1): 5'-3 attached inverted deoxyabasic moiety.
  misc_feature (1)..(1): 2'deoxy-2'-fluoro
  misc_feature (6)..(6): 2'deoxy-2'-fluoro
  misc_feature (8)..(8): 2'deoxy-2'-fluoro
  misc_feature (10)..(10): 2'deoxy-2'-fluoro
  misc_feature (15)..(15): 2'deoxy-2'-fluoro
  misc_feature (18)..(18): 2'deoxy-2'-fluoro
  misc_feature (21)..(21): 3'-3 attached inverted deoxyabasic moiety.
cggaaugugcaaaguagcatt

SEQ ID NO: 3999 - DNA, 21 bp, Artificial Sequence
  Synthetic
  misc_feature (1)..(1): 5'-3 attached inverted deoxyabasic moiety.
  misc_feature (3)..(3): 2'deoxy-2'-fluoro
  misc_feature (6)..(7): 2'deoxy-2'-fluoro
  misc_feature (10)..(10): 2'deoxy-2'-fluoro
  misc_feature (13)..(13): 2'deoxy-2'-fluoro
  misc_feature (15)..(17): 2'deoxy-2'-fluoro
  misc_feature (19)..(19): 2'deoxy-2'-fluoro
  misc_feature (21)..(21): 3'-3 attached inverted deoxyabasic moiety.
ggcaguuggcaacacucautt

SEQ ID NO: 4000 - DNA, 21 bp, Artificial Sequence
  Synthetic
  misc_feature (1)..(1): 5'-3 attached inverted deoxyabasic moiety.
  misc_feature (3)..(4): 2'-deoxy-2'-fluoro
  misc_feature (6)..(6): 2'-deoxy-2'-fluoro
  misc_feature (9)..(9): 2'-deoxy-2'-fluoro
  misc_feature (15)..(17): 2'-deoxy-2'-fluoro
  misc_feature (21)..(21): 3'-3 attached inverted deoxyabasic moiety.
gauugcgacggaaauuugatt

SEQ ID NO: 4001 - DNA, 21 bp, Artificial Sequence
  Synthetic
  misc_feature (1)..(1): 5'-3 attached inverted deoxyabasic moiety.
  misc_feature (6)..(8): 2'-deoxy-2'-fluoro
  misc_feature (12)..(12): 2'-deoxy-2'-fluoro
  misc_feature (14)..(14): 2'-deoxy-2'-fluoro
  misc_feature (16)..(19): 2'-deoxy-2'-fluoro
  misc_feature (21)..(21): 3'-3 attached inverted deoxyabasic moiety.
ggaaauuugagcguauucutt

SEQ ID NO: 4002 - DNA, 21 bp, Artificial Sequence
  Synthetic
  misc_feature (1)..(1): 5'-3 attached inverted deoxyabasic moiety.
  misc_feature (2)..(2): 2'-deoxy-2'-fluoro
  misc_feature (4)..(9): 2'-deoxy-2'-fluoro
  misc_feature (11)..(11): 2'-deoxy-2'-fluoro
  misc_feature (13)..(13): 2'-deoxy-2'-fluoro
  misc_feature (17)..(19): 2'-deoxy-2'-fluoro
  misc_feature (21)..(21): 3'-3 attached inverted deoxyabasic moiety.
guauucucuacguggauuutt

SEQ ID NO: 4003 - DNA, 21 bp, Artificial Sequence
  Synthetic
  misc_feature (2)..(2): 2'-deoxy-2'-fluoro
  misc_feature (6)..(6): 2'-deoxy-2'-fluoro
  misc_feature (8)..(8): 2'-deoxy-2'-fluoro
  misc_feature (12)..(13): 2'-deoxy-2'-fluoro
  misc_feature (18)..(19): 2'-deoxy-2'-fluoro
  misc_feature (20)..(21): phosphorothioate linkage
auagauauaaaccgggacctt

SEQ ID NO: 4004 - DNA, 21 bp, Artificial Sequence
  Synthetic
  misc_feature (1)..(1): 2'-deoxy-2'-fluoro
  misc_feature (6)..(6): 2'-deoxy-2'-fluoro
  misc_feature (8)..(10): 2'-deoxy-2'-fluoro
  misc_feature (12)..(13): 2'-deoxy-2'-fluoro
  misc_feature (16)..(19): 2'-deoxy-2'-fluoro
  misc_feature (20)..(21): phosphorothioate linkage
uaagacacuugccaauucctt

SEQ ID NO: 4005 - DNA, 21 bp, Artificial Sequence
  Synthetic
  misc_feature (1)..(1): 2'-deoxy-2'-fluoro
  misc_feature (3)..(3): 2'-deoxy-2'-fluoro
  misc_feature (5)..(5): 2'-deoxy-2'-fluoro
  misc_feature (7)..(10): 2'-deoxy-2'-fluoro
  misc_feature (12)..(13): 2'-deoxy-2'-fluoro
  misc_feature (16)..(17): 2'-deoxy-2'-fluoro
  misc_feature (20)..(21): phosphorothioate linkage
ugcacauuccgucaaucagtt

SEQ ID NO: 4006 - DNA, 21 bp, Artificial Sequence
  Synthetic
  misc_feature (1)..(1): 2'-deoxy-2'-fluoro
  misc_feature (3)..(4): 2'-deoxy-2'-fluoro
  misc_feature (6)..(9): 2'-deoxy-2'-fluoro
  misc_feature (11)..(11): 2'-deoxy-2'-fluoro
  misc_feature (13)..(13): 2'-deoxy-2'-fluoro
  misc_feature (15)..(18): 2'-deoxy-2'-fluoro
  misc_feature (20)..(21): phosphorothioate linkage
ugcuacuuugcacauuccgtt

SEQ ID NO: 4007 - DNA, 21 bp, Artificial Sequence
  Synthetic
  misc_feature (2)..(2): 2'-deoxy-2'-fluoro
  misc_feature (6)..(6): 2'-deoxy-2'-fluoro
  misc_feature (8)..(9): 2'-deoxy-2'-fluoro
  misc_feature (11)..(12): 2'-deoxy-2'-fluoro
  misc_feature (15)..(16): 2'-deoxy-2'-fluoro
  misc_feature (18)..(19): 2'-deoxy-2'-fluoro
  misc_feature (20)..(21): phosphorothioate linkage
augaguguugccaacugcctt

SEQ ID NO: 4008 - DNA, 21 bp, Artificial Sequence
  Synthetic
  misc_feature (1)..(2): 2'-deoxy-2'-fluoro
  misc_feature (6)..(10): 2'-deoxy-2'-fluoro
  misc_feature (12)..(13): 2'-deoxy-2'-fluoro
  misc_feature (15)..(15): 2'-deoxy-2'-fluoro
  misc_feature (18)..(19): 2'-deoxy-2'-fluoro
  misc_feature (20)..(21): phosphorothioate linkage
ucaaauuuccgucgcaauctt

SEQ ID NO: 4009 - DNA, 21 bp, Artificial Sequence
  Synthetic
  misc_feature (5)..(5): 2'-deoxy-2'-fluoro
  misc_feature (7)..(7): 2'-deoxy-2'-fluoro
  misc_feature (9)..(11): 2'-deoxy-2'-fluoro
  misc_feature (15)..(19): 2'-deoxy-2'-fluoro
  misc_feature (20)..(21): phosphorothioate linkage
agaauacgcucaaauuucctt

SEQ ID NO: 4010 - DNA, 21 bp, Artificial Sequence
  Synthetic
  misc_feature (4)..(6): 2'-deoxy-2'-fluoro
  misc_feature (8)..(8): 2'-deoxy-2'-fluoro
  misc_feature (10)..(10): 2'-deoxy-2'-fluoro
  misc_feature (17)..(17): 2'-deoxy-2'-fluoro
  misc_feature (19)..(19): 2'-deoxy-2'-fluoro
  misc_feature (20)..(21): phosphorothioate linkage
aaauccacguagagaauactt

SEQ ID NO: 4011 - DNA, 21 bp, Artificial Sequence
  Synthetic
  misc_feature (1)..(1): 5'-3 attached inverted deoxyabasic moiety.
  misc_feature (1)..(2): deoxy Guanosine
  misc_feature (3)..(6): 2'-deoxy-2'-fluoro
  misc_feature (7)..(8): deoxy Guanosine
  misc_feature (9)..(11): 2'-deoxy-2'-fluoro
  misc_feature (12)..(12): deoxy Adenosine
  misc_feature (13)..(13): 2'-deoxy-2'-fluoro
  misc_feature (14)..(14): deoxy Adenosine
  misc_feature (15)..(17): 2'-deoxy-2'-fluoro
  misc_feature (18)..(18): deoxy Adenosine
  misc_feature (19)..(19): 2'-deoxy-2'-fluoro
  misc_feature (21)..(21): 3'-3 attached inverted deoxyabasic moiety.
ggucccgguuuauaucuautt

SEQ ID NO: 4012 - DNA, 21 bp, Artificial Sequence
  Synthetic
  misc_feature (1)..(1): 5'-3 attached inverted deoxyabasic moiety.
  misc_feature (1)..(2): deoxy Guanosine
  misc_feature (3)..(4): deoxy Adenosine
  misc_feature (5)..(6): 2'-deoxy-2'-fluoro
  misc_feature (7)..(8): deoxy Guanosine
  misc_feature (9)..(9): 2'-deoxy-2'-fluoro
  misc_feature (10)..(11): deoxy Adenosine
  misc_feature (12)..(12): deoxy Guanosine
  misc_feature (13)..(13): 2'-deoxy-2'-fluoro
  misc_feature (14)..(14): deoxy Guanosine
  misc_feature (15)..(18): 2'-deoxy-2'-fluoro
  misc_feature (19)..(19): deoxy Adenosine
  misc_feature (21)..(21): 3'-3 attached inverted deoxyabasic moiety.
ggaauuggcaagugucuuatt

SEQ ID NO: 4013 - DNA, 21 bp, Artificial Sequence
  Synthetic
  misc_feature (1)..(1): 5'-3 attached inverted deoxyabasic moiety.
  misc_feature (1)..(2): 2'-deoxy-2'-fluoro
  misc_feature (3)..(3): deoxy Guanosine
  misc_feature (4)..(4): deoxy Adenosine
  misc_feature (5)..(6): 2'-deoxy-2'-fluoro
  misc_feature (7)..(7): deoxy Guanosine
  misc_feature (8)..(8): deoxy Adenosine
  misc_feature (9)..(9): 2'-deoxy-2'-fluoro
  misc_feature (10)..(11): deoxy Guanosine
  misc_feature (12)..(13): deoxy Adenosine
  misc_feature (14)..(14): 2'-deoxy-2'-fluoro
  misc_feature (15)..(15): deoxy Guanosine
  misc_feature (16)..(16): 2'-deoxy-2'-fluoro
  misc_feature (17)..(17): deoxy Guanosine
  misc_feature (18)..(18): 2'-deoxy-2'-fluoro
  misc_feature (19)..(19): deoxy Adenosine
  misc_feature (21)..(21): 3'-3 attached inverted deoxyabasic moiety.
cugauugacggaaugugcatt

SEQ ID NO: 4014 - DNA, 21 bp, Artificial Sequence
  Synthetic
  misc_feature (1)..(1): 5'-3 attached inverted deoxyabasic moiety.
  misc_feature (1)..(1): 2'-deoxy-2'-fluoro
  misc_feature (2)..(3): deoxy Guanosine
  misc_feature (4)..(5): deoxy Adenosine
  misc_feature (6)..(6): 2'-deoxy-2'-fluoro
  misc_feature (7)..(7): deoxy Guanosine
  misc_feature (8)..(8): 2'-deoxy-2'-fluoro
  misc_feature (9)..(9): deoxy Guanosine
  misc_feature (10)..(10): 2'-deoxy-2'-fluoro
  misc_feature (11)..(13): deoxy Adenosine
  misc_feature (14)..(14): deoxy Guanosine
  misc_feature (15)..(15): 2'-deoxy-2'-fluoro
  misc_feature (16)..(16): deoxy Adenosine
  misc_feature (17)..(17): deoxy Guanosine
  misc_feature (18)..(18): 2'-deoxy-2'-fluoro
  misc_feature (19)..(19): deoxy Adenosine
  misc_feature (21)..(21): 3'-3 attached inverted deoxyabasic moiety.
cggaaugugcaaaguagcatt

SEQ ID NO: 4015 - DNA, 21 bp, Artificial Sequence
  Synthetic
  misc_feature (1)..(1): 5'-3 attached inverted deoxyabasic moiety.
  misc_feature (1)..(2): deoxy Guanosine
  misc_feature (3)..(3): 2'-deoxy-2'-fluoro
  misc_feature (4)..(4): deoxy Adenosine
  misc_feature (5)..(5): deoxy Guanosine
  misc_feature (6)..(7): 2'-deoxy-2'-fluoro
  misc_feature (8)..(9): deoxy Guanosine
  misc_feature (10)..(10): 2'-deoxy-2'-fluoro
  misc_feature (11)..(12): deoxy Adenosine
  misc_feature (13)..(13): 2'-deoxy-2'-fluoro
  misc_feature (14)..(14): deoxy Adenosine
  misc_feature (15)..(17): 2'-deoxy-2'-fluoro
  misc_feature (18)..(18): deoxy Adenosine
  misc_feature (19)..(19): 2'-deoxy-2'-fluoro
  misc_feature (21)..(21): 3'-3 attached inverted deoxyabasic moiety.
ggcaguuggcaacacucautt

SEQ ID NO: 4016 - DNA, 21 bp, Artificial Sequence
  Synthetic
  misc_feature (1)..(1): 5'-3 attached inverted deoxyabasic moiety.
  misc_feature (1)..(1): deoxy Guanosine
  misc_feature (2)..(2): deoxy Adenosine
  misc_feature (3)..(4): 2'-deoxy-2'-fluoro
  misc_feature (5)..(5): deoxy Guanosine
  misc_feature (6)..(6): 2'-deoxy-2'-fluoro
  misc_feature (7)..(7): deoxy Guanosine
  misc_feature (8)..(8): deoxy Adenosine
  misc_feature (9)..(9): 2'-deoxy-2'-fluoro
  misc_feature (10)..(11): deoxy Guanosine
  misc_feature (12)..(14): deoxy Adenosine
  misc_feature (15)..(17): 2'-deoxy-2'-fluoro
  misc_feature (18)..(18): deoxy Guanosine
  misc_feature (19)..(19): deoxy Adenosine
  misc_feature (21)..(21): 3'-3 attached inverted deoxyabasic moiety.
gauugcgacggaaauuugatt

SEQ ID NO: 4017 - DNA, 21 bp, Artificial Sequence
  Synthetic
  misc_feature (1)..(1): 5'-3 attached inverted deoxyabasic moiety.
  misc_feature (1)..(2): deoxy Guanosine
  misc_feature (3)..(5): deoxy Adenosine
  misc_feature (6)..(8): 2'-deoxy-2'-fluoro
  misc_feature (9)..(9): deoxy Guanosine
  misc_feature (10)..(10): deoxy Adenosine
  misc_feature (11)..(11): deoxy Guanosine
  misc_feature (12)..(12): 2'-deoxy-2'-fluoro
  misc_feature (13)..(13): deoxy Guanosine
  misc_feature (14)..(14): 2'-deoxy-2'-fluoro
  misc_feature (15)..(15): deoxy Adenosine
  misc_feature (16)..(19): 2'-deoxy-2'-fluoro
  misc_feature (21)..(21): 3'-3 attached inverted deoxyabasic moiety.
ggaaauuugagcguauucutt

SEQ ID NO: 4018 - DNA, 21 bp, Artificial Sequence
  Synthetic
  misc_feature (1)..(1): 5'-3 attached inverted deoxyabasic moiety.
  misc_feature (1)..(1): deoxy Guanosine
  misc_feature (2)..(2): 2'-deoxy-2'-fluoro
  misc_feature (3)..(3): deoxy Adenosine
  misc_feature (4)..(9): 2'-deoxy-2'-fluoro
  misc_feature (10)..(10): deoxy Adenosine
  misc_feature (11)..(11): 2'-deoxy-2'-fluoro
  misc_feature (12)..(12): deoxy Guanosine
  misc_feature (13)..(13): 2'-deoxy-2'-fluoro
  misc_feature (14)..(15): deoxy Guanosine
  misc_feature (16)..(16): deoxy Adenosine
  misc_feature (17)..(19): 2'-deoxy-2'-fluoro
  misc_feature (21)..(21): 3'-3 attached inverted deoxyabasic moiety.
guauucucuacguggauuutt

SEQ ID NO: 4019 - DNA, 21 bp, Artificial Sequence
  Synthetic
  misc_feature (1)..(1): deoxy Adenosine
  misc_feature (2)..(2): 2'-deoxy-2'-fluoro
  misc_feature (3)..(3): deoxy Adenosine
  misc_feature (4)..(4): deoxy Guanosine
  misc_feature (5)..(5): deoxy Adenosine
  misc_feature (6)..(6): 2'-deoxy-2'-fluoro
  misc_feature (7)..(7): deoxy Adenosine
  misc_feature (8)..(8): 2'-deoxy-2'-fluoro
  misc_feature (9)..(11): deoxy Adenosine
  misc_feature (12)..(13): 2'-deoxy-2'-fluoro
  misc_feature (14)..(16): deoxy Guanosine
  misc_feature (17)..(17): deoxy Adenosine
  misc_feature (18)..(19): 2'-deoxy-2'-fluoro
  misc_feature (20)..(21): phosphorothioate linkage
auagauauaaaccgggacctt

SEQ ID NO: 4020 - DNA, 21 bp, Artificial Sequence
  Synthetic
  misc_feature (1)..(1): 2'-deoxy-2'-fluoro
  misc_feature (2)..(3): deoxy Adenosine
  misc_feature (4)..(4): deoxy Guanosine
  misc_feature (5)..(5): deoxy Adenosine
  misc_feature (6)..(6): 2'-deoxy-2'-fluoro
  misc_feature (7)..(7): deoxy Adenosine
  misc_feature (8)..(10): 2'-deoxy-2'-fluoro
  misc_feature (11)..(11): deoxy Guanosine
  misc_feature (12)..(13): 2'-deoxy-2'-fluoro
  misc_feature (14)..(15): deoxy Adenosine
  misc_feature (16)..(19): 2'-deoxy-2'-fluoro
  misc_feature (20)..(21): phosphorothioate linkage
uaagacacuugccaauucctt

SEQ ID NO: 4021 - DNA, 21 bp, Artificial Sequence
  Synthetic
  misc_feature (1)..(1): 2'-deoxy-2'-fluoro
  misc_feature (2)..(2): deoxy Guanosine
  misc_feature (3)..(3): 2'-deoxy-2'-fluoro
  misc_feature (4)..(4): dexoy Adenosine
  misc_feature (5)..(5): 2'-deoxy-2'-fluoro
  misc_feature (6)..(6): deoxy Adenosine
  misc_feature (7)..(10): 2'-deoxy-2'-fluoro
  misc_feature (11)..(11): deoxy Guanosine
  misc_feature (12)..(13): 2'-deoxy-2'-fluoro
  misc_feature (14)..(15): deoxy Adenosine
  misc_feature (16)..(17): 2'-deoxy-2'-fluoro
  misc_feature (18)..(18): deoxy Adenosine
  misc_feature (19)..(19): deoxy Guanosine
  misc_feature (20)..(21): phosphorothioate linkage
ugcacauuccgucaaucagtt

SEQ ID NO: 4022 - DNA, 21 bp, Artificial Sequence
  Synthetic
  misc_feature (1)..(1): 2'-deoxy-2'-fluoro
  misc_feature (2)..(2): deoxy Guanosine
  misc_feature (3)..(4): 2'-deoxy-2'-fluoro
  misc_feature (5)..(5): deoxy Adenosine
  misc_feature (6)..(9): 2'-deoxy-2'-fluoro
  misc_feature (10)..(10): deoxy Guanosine
  misc_feature (11)..(11): 2'-deoxy-2'-fluoro
  misc_feature (12)..(12): deoxy Adenosine
  misc_feature (13)..(13): 2'-deoxy-2'-fluoro
  misc_feature (14)..(14): deoxy Adenosine
  misc_feature (15)..(18): 2'-deoxy-2'-fluoro
  misc_feature (19)..(19): deoxy Guanosine
  misc_feature (20)..(21): phosphorothioate linkage
ugcuacuuugcacauuccgtt

SEQ ID NO: 4023 - DNA, 21 bp, Artificial Sequence
  Synthetic
  misc_feature (1)..(1): deoxy Adenosine
  misc_feature (2)..(2): 2'-deoxy-2'-fluoro
  misc_feature (3)..(3): deoxy Guanosine
  misc_feature (4)..(4): deoxy Adenosine
  misc_feature (5)..(5): deoxy Guanosine
  misc_feature (6)..(6): 2'-deoxy-2'-fluoro
  misc_feature (7)..(7): deoxy Guanosine
  misc_feature (8)..(9): 2'-deoxy-2'-fluoro
  misc_feature (10)..(10): deoxy Guanosine
  misc_feature (11)..(12): 2'-deoxy-2'-fluoro
  misc_feature (13)..(14): deoxy Adenosine
  misc_feature (15)..(16): 2'-deoxy-2'-fluoro
  misc_feature (17)..(17): deoxy Guanosine
  misc_feature (18)..(19): 2'-deoxy-2'-fluoro
  misc_feature (20)..(21): phosphorothioate linkage
augaguguugccaacugcctt

SEQ ID NO: 4024 - DNA, 21 bp, Artificial Sequence
  Synthetic
  misc_feature (1)..(2): 2'-deoxy-2'-fluoro
  misc_feature (3)..(5): deoxy Adenosine
  misc_feature (6)..(10): 2'-deoxy-2'-fluoro
  misc_feature (11)..(11): deoxy Guanosine
  misc_feature (12)..(13): 2'-deoxy-2'-fluoro
  misc_feature (14)..(14): deoxy Guanosine
  misc_feature (15)..(15): 2'-deoxy-2'-fluoro
  misc_feature (16)..(17): deoxy Adenosine
  misc_feature (18)..(19): 2'-deoxy-2'-fluoro
  misc_feature (20)..(21): phosphorothioate linkage
ucaaauuuccgucgcaauctt

SEQ ID NO: 4025 - DNA, 21 bp, Artificial Sequence
  Synthetic
  misc_feature (1)..(1): deoxy Adenosine
  misc_feature (2)..(2): deoxy Guanosine
  misc_feature (3)..(4): deoxy Adenosine
  misc_feature (5)..(5): 2'-deoxy-2'-fluoro
  misc_feature (6)..(6): deoxy Adenosine
  misc_feature (7)..(7): 2'-deoxy-2'-fluoro
  misc_feature (8)..(8): deoxy Guanosine
  misc_feature (9)..(11): 2'-deoxy-2'-fluoro
  misc_feature (12)..(14): deoxy Adenosine
  misc_feature (15)..(19): 2'-deoxy-2'-fluoro
  misc_feature (20)..(21): phosphorothioate linkage
agaauacgcucaaauuucctt

SEQ ID NO: 4026 - DNA, 21 bp, Artificial Sequence
  Synthetic
  misc_feature (1)..(3): deoxy Adenosine
  misc_feature (4)..(6): 2'-deoxy-2'-fluoro
  misc_feature (7)..(7): deoxy Adenosine
  misc_feature (8)..(8): 2'-deoxy-2'-fluoro
  misc_feature (9)..(9): deoxy Guanosine
  misc_feature (10)..(10): 2'-deoxy-2'-fluoro
  misc_feature (11)..(11): deoxy Adenosine
  misc_feature (12)..(12): deoxy Guanosine
  misc_feature (13)..(13): deoxy Adenosine
  misc_feature (14)..(14): deoxy Guanosine
  misc_feature (15)..(16): deoxy Adenosine
  misc_feature (17)..(17): 2'-deoxy-2'-fluoro
  misc_feature (18)..(18): deoxy Adenosine
  misc_feature (19)..(19): 2'-deoxy-2'-fluoro
  misc_feature (20)..(21): phosphorothioate linkage
aaauccacguagagaauactt

SEQ ID NO: 4027 - DNA, 21 bp, Artificial Sequence
  Synthetic
  misc_feature (1)..(1): 5'-3 attached inverted deoxyabasic moiety.
  misc_feature (1)..(2): 2'-O-methyl Guanosine
  misc_feature (3)..(6): 2'-deoxy-2'-fluoro
  misc_feature (7)..(8): 2'-O-methyl Guanosine
  misc_feature (9)..(11): 2'-deoxy-2'-fluoro
  misc_feature (12)..(12): 2'-O-methyl Adenosine
  misc_feature (13)..(13): 2'-deoxy-2'-fluoro
  misc_feature (14)..(14): 2'-O-methyl Adenosine
  misc_feature (15)..(17): 2'-deoxy-2'-fluoro
  misc_feature (18)..(18): 2'-O-methyl Adenosine
  misc_feature (19)..(19): 2'-deoxy-2'-fluoro
  misc_feature (21)..(21): 3'-3 attached inverted deoxyabasic moiety.
ggucccgguuuauaucuautt

SEQ ID NO: 4028 - DNA, 21 bp, Artificial Sequence
  Synthetic
  misc_feature (1)..(1): 5'-3 attached inverted deoxyabasic moiety.
  misc_feature (1)..(2): 2'-O-methyl Guanosine
  misc_feature (3)..(4): 2'-O-methyl Adenosine
  misc_feature (5)..(6): 2'-deoxy-2'-fluoro
  misc_feature (7)..(8): 2'-O-methyl Guanosine
  misc_feature (9)..(9): 2'-deoxy-2'-fluoro
  misc_feature (10)..(11): 2'-O-methyl Adenosine
  misc_feature (12)..(12): 2'-O-methyl Guanosine
  misc_feature (13)..(13): 2'-deoxy-2'-fluoro
  misc_feature (14)..(14): 2'-O-methyl Guanosine
  misc_feature (15)..(18): 2'-deoxy-2'-fluoro
  misc_feature (19)..(19): 2'-O-methyl Adenosine
  misc_feature (21)..(21): 3'-3 attached inverted deoxyabasic moiety.
ggaauuggcaagugucuuatt

SEQ ID NO: 4029 - DNA, 21 bp, Artificial Sequence
  Synthetic
  misc_feature (1)..(1): 5'-3 attached inverted deoxyabasic moiety.
  misc_feature (1)..(2): 2'-deoxy-2'-fluoro
  misc_feature (3)..(3): 2'-O-methyl Guanosine
  misc_feature (4)..(4): 2'-O-methyl Adenosine
  misc_feature (5)..(6): 2'-deoxy-2'-fluoro
  misc_feature (7)..(7): 2'-O-methyl Guanosine
  misc_feature (8)..(8): 2'-O-methyl Adenosine
  misc_feature (9)..(9): 2'-deoxy-2'-fluoro
  misc_feature (10)..(11): 2'-O-methyl Guanosine
  misc_feature (12)..(13): 2'-O-methyl Adenosine
  misc_feature (14)..(14): 2'-deoxy-2'-fluoro
  misc_feature (15)..(15): 2'-O-methyl Guanosine
  misc_feature (16)..(16): 2'-deoxy-2'-fluoro
  misc_feature (17)..(17): 2'-O-methyl Guanosine
  misc_feature (18)..(18): 2'-deoxy-2'-fluoro
  misc_feature (19)..(19): 2'-O-methyl Adenosine
  misc_feature (21)..(21): 3'-3 attached inverted deoxyabasic moiety.
cugauugacggaaugugcatt

SEQ ID NO: 4030 - DNA, 21 bp, Artificial Sequence
  Synthetic
  misc_feature (1)..(1): 5'-3 attached inverted deoxyabasic moiety.
  misc_feature (1)..(1): 2'-deoxy-2'-fluoro
  misc_feature (2)..(3): 2'-O-methyl Guanosine
  misc_feature (4)..(5): 2'-O-methyl Adenosine
  misc_feature (6)..(6): 2'-deoxy-2'-fluoro
  misc_feature (7)..(7): 2'-O-methyl Guanosine
  misc_feature (8)..(8): 2'-deoxy-2'-fluoro
  misc_feature (9)..(9): 2'-O-methyl Guanosine
  misc_feature (10)..(10): 2'-deoxy-2'-fluoro
  misc_feature (11)..(13): 2'-O-methyl Adenosine
  misc_feature (14)..(14): 2'-O-methyl Guanosine
  misc_feature (15)..(15): 2'-deoxy-2'-fluoro
  misc_feature (16)..(16): 2'-O-methyl Adenosine
  misc_feature (17)..(17): 2'-O-methyl Guanosine
  misc_feature (18)..(18): 2'-deoxy-2'-fluoro
  misc_feature (19)..(19): 2'-O-methyl Adenosine
  misc_feature (21)..(21): 3'-3 attached inverted deoxyabasic moiety.
cggaaugugcaaaguagcatt

SEQ ID NO: 4031 - DNA, 21 bp, Artificial Sequence
  Synthetic
  misc_feature (1)..(1): 5'-3 attached inverted deoxyabasic moiety.
  misc_feature (1)..(2): 2'-O-methyl Guanosine
  misc_feature (3)..(3): 2'-deoxy-2'-fluoro
  misc_feature (4)..(4): 2'-O-methyl Adenosine
  misc_feature (5)..(5): 2'-O-methyl Guanosine
  misc_feature (6)..(7): 2'-deoxy-2'-fluoro
  misc_feature (8)..(9): 2'-O-methyl Guanosine
  misc_feature (10)..(10): 2'-deoxy-2'-fluoro
  misc_feature (11)..(12): 2'-O-methyl Adenosine
  misc_feature (13)..(13): 2'-deoxy-2'-fluoro
  misc_feature (14)..(14): 2'-O-methyl Adenosine
  misc_feature (15)..(17): 2'-deoxy-2'-fluoro
  misc_feature (18)..(18): 2'-O-methyl Adenosine
  misc_feature (19)..(19): 2'-deoxy-2'-fluoro
  misc_feature (21)..(21): 3'-3 attached inverted deoxyabasic moiety.
ggcaguuggcaacacucautt

SEQ ID NO: 4032 - DNA, 21 bp, Artificial Sequence
  Synthetic
  misc_feature (1)..(1): 5'-3 attached inverted deoxyabasic moiety.
  misc_feature (1)..(1): 2'-O-methyl Guanosine
  misc_feature (2)..(2): 2'-O-methyl Adenosine
  misc_feature (3)..(4): 2'-deoxy-2'-fluoro
  misc_feature (5)..(5): 2'-O-methyl Guanosine
  misc_feature (6)..(6): 2'-deoxy-2'-fluoro
  misc_feature (7)..(7): 2'-O-methyl Guanosine
  misc_feature (8)..(8): 2'-O-methyl Adenosine
  misc_feature (9)..(9): 2'-deoxy-2'-fluoro
  misc_feature (10)..(11): 2'-O-methyl Guanosine
  misc_feature (12)..(14): 2'-O-methyl Adenosine
  misc_feature (15)..(17): 2'-deoxy-2'-fluoro
  misc_feature (18)..(18): 2'-O-methyl Guanosine
  misc_feature (19)..(19): 2'-O-methyl Adenosine
  misc_feature (21)..(21): 3'-3 attached inverted deoxyabasic moiety.
gauugcgacggaaauuugatt

SEQ ID NO: 4033 - DNA, 21 bp, Artificial Sequence
  Synthetic
  misc_feature (1)..(1): 5'-3 attached inverted deoxyabasic moiety.
  misc_feature (1)..(2): 2'-O-methyl Guanosine
  misc_feature (3)..(5): 2'-O-methyl Adenosine
  misc_feature (6)..(8): 2'-deoxy-2'-fluoro
  misc_feature (9)..(9): 2'-O-methyl Guanosine
  misc_feature (10)..(10): 2'-O-methyl Adenosine
  misc_feature (11)..(11): 2'-O-methyl Guanosine
  misc_feature (12)..(12): 2'-deoxy-2'-fluoro
  misc_feature (13)..(13): 2'-O-methyl Guanosine
  misc_feature (14)..(14): 2'-deoxy-2'-fluoro
  misc_feature (15)..(15): 2'-O-methyl Adenosine
  misc_feature (16)..(19): 2'-deoxy-2'-fluoro
  misc_feature (21)..(21): 3'-3 attached inverted deoxyabasic moiety.
ggaaauuugagcguauucutt

SEQ ID NO: 4034 - DNA, 21 bp, Artificial Sequence
  Synthetic
  misc_feature (1)..(1): 5'-3 attached inverted deoxyabasic moiety.
  misc_feature (1)..(1): 2'-O-methyl Guanosine
  misc_feature (2)..(2): 2'-deoxy-2'-fluoro
  misc_feature (3)..(3): 2'-O-methyl Adenosine
  misc_feature (4)..(9): 2'-deoxy-2'-fluoro
  misc_feature (10)..(10): 2'-O-methyl Adenosine
  misc_feature (11)..(11): 2'-deoxy-2'-fluoro
  misc_feature (12)..(12): 2'-O-methyl Guanosine
  misc_feature (13)..(13): 2'-deoxy-2'-fluoro
  misc_feature (14)..(15): 2'-O-methyl Guanosine
  misc_feature (16)..(16): 2'-O-methyl Adenosine
  misc_feature (17)..(19): 2'-deoxy-2'-fluoro
  misc_feature (21)..(21): 3'-3 attached inverted deoxyabasic moiety.
guauucucuacguggauuutt

SEQ ID NO: 4035 - DNA, 21 bp, Artificial Sequence
  Synthetic
  misc_feature (1)..(1): 2'-O-methyl Adenosine
  misc_feature (2)..(2): 2'-deoxy-2'-fluoro
  misc_feature (3)..(3): 2'-O-methyl Adenosine
  misc_feature (4)..(4): 2'-O-methyl Guanosine
  misc_feature (5)..(5): 2'-O-methyl Adenosine
  misc_feature (6)..(6): 2'-deoxy-2'-fluoro
  misc_feature (7)..(7): 2'-O-methyl Adenosine
  misc_feature (8)..(8): 2'-deoxy-2'-fluoro
  misc_feature (9)..(11): 2'-O-methyl Adenosine
  misc_feature (12)..(13): 2'-deoxy-2'-fluoro
  misc_feature (14)..(16): 2'-O-methyl Guanosine
  misc_feature (17)..(17): 2'-O-methyl Adenosine
  misc_feature (18)..(19): 2'-deoxy-2'-fluoro
  misc_feature (20)..(21): phosphorothioate linkage
auagauauaaaccgggacctt

SEQ ID NO: 4036 - DNA, 21 bp, Artificial Sequence
  Synthetic
  misc_feature (1)..(1): 2'-deoxy-2'-fluoro
  misc_feature (2)..(3): 2'-O-methyl Adenosine
  misc_feature (4)..(4): 2'-O-methyl Guanosine
  misc_feature (5)..(5): 2'-O-methyl Adenosine
  misc_feature (6)..(6): 2'-deoxy-2'-fluoro
  misc_feature (7)..(7): 2'-O-methyl Adenosine
  misc_feature (8)..(10): 2'-deoxy-2'-fluoro
  misc_feature (11)..(11): 2'-O-methyl Guanosine
  misc_feature (12)..(13): 2'-deoxy-2'-fluoro
  misc_feature (14)..(15): 2'-O-methyl Adenosine
  misc_feature (16)..(19): 2'-deoxy-2'-fluoro
  misc_feature (20)..(21): phosphorothioate linkage
uaagacacuugccaauucctt

SEQ ID NO: 4037 - DNA, 21 bp, Artificial Sequence
  Synthetic
  misc_feature (1)..(1): 2'-deoxy-2'-fluoro
  misc_feature (2)..(2): 2'-O-methyl Guanosine
  misc_feature (3)..(3): 2'-deoxy-2'-fluoro
  misc_feature (4)..(4): 2'-O-methyl Adenosine
  misc_feature (5)..(5): 2'-deoxy-2'-fluoro
  misc_feature (6)..(6): 2'-O-methyl Adenosine
  misc_feature (7)..(10): 2'-deoxy-2'-fluoro
  misc_feature (11)..(11): 2'-O-methyl Guanosine
  misc_feature (12)..(13): 2'-deoxy-2'-fluoro
  misc_feature (14)..(15): 2'-O-methyl Adenosine
  misc_feature (16)..(17): 2'-deoxy-2'-fluoro
  misc_feature (18)..(18): 2'-O-methyl Adenosine
  misc_feature (19)..(19): 2'-O-methyl Guanosine
  misc_feature (20)..(21): phosphorothioate linkage
ugcacauuccgucaaucagtt

SEQ ID NO: 4038 - DNA, 21 bp, Artificial Sequence
  Synthetic
  misc_feature (1)..(1): 2'-deoxy-2'-fluoro
  misc_feature (2)..(2): 2'-O-methyl Guanosine
  misc_feature (3)..(4): 2'-deoxy-2'-fluoro
  misc_feature (5)..(5): 2'-O-methyl Adenosine
  misc_feature (6)..(9): 2'-deoxy-2'-fluoro
  misc_feature (10)..(10): 2'-O-methyl Guanosine
  misc_feature (11)..(11): 2'-deoxy-2'-fluoro
  misc_feature (12)..(12): 2'-O-methyl Adenosine
  misc_feature (13)..(13): 2'-deoxy-2'-fluoro
  misc_feature (14)..(14): 2'-O-methyl Adenosine
  misc_feature (15)..(18): 2'-deoxy-2'-fluoro
  misc_feature (19)..(19): 2'-O-methyl Guanosine
  misc_feature (20)..(21): phosphorothioate linkage
ugcuacuuugcacauuccgtt

SEQ ID NO: 4039 - DNA, 21 bp, Artificial Sequence
  Synthetic
  misc_feature (1)..(1): 2'-O-methyl Adenosine
  misc_feature (2)..(2): 2'-deoxy-2'-fluoro
  misc_feature (3)..(3): 2'-O-methyl Guanosine
  misc_feature (4)..(4): 2'-O-methyl Adenosine
  misc_feature (5)..(5): 2'-O-methyl Guanosine
  misc_feature (6)..(6): 2'-deoxy-2'-fluoro
  misc_feature (7)..(7): 2'-O-methyl Guanosine
  misc_feature (8)..(9): 2'-deoxy-2'-fluoro
  misc_feature (10)..(10): 2'-O-methyl Guanosine
  misc_feature (11)..(12): 2'-deoxy-2'-fluoro
  misc_feature (13)..(14): 2'-O-methyl Adenosine
  misc_feature (15)..(16): 2'-deoxy-2'-fluoro
  misc_feature (17)..(17): 2'-O-methyl Guanosine
  misc_feature (18)..(19): 2'-deoxy-2'-fluoro
  misc_feature (20)..(21): phosphorothioate linkage
augaguguugccaacugcctt

SEQ ID NO: 4040 - DNA, 21 bp, Artificial Sequence
  Synthetic
  misc_feature (1)..(2): 2'-deoxy-2'-fluoro
  misc_feature (3)..(5): 2'-O-methyl Adenosine
  misc_feature (6)..(10): 2'-deoxy-2'-fluoro
  misc_feature (11)..(11): 2'-O-methyl Guanosine
  misc_feature (12)..(13): 2'-deoxy-2'-fluoro
  misc_feature (14)..(14): 2'-O-methyl Guanosine
  misc_feature (15)..(15): 2'-deoxy-2'-fluoro
  misc_feature (16)..(17): 2'-O-methyl Adenosine
  misc_feature (18)..(19): 2'-deoxy-2'-fluoro
  misc_feature (20)..(21): phosphorothioate linkage
ucaaauuuccgucgcaauctt

SEQ ID NO: 4041 - DNA, 21 bp, Artificial Sequence
  Synthetic
  misc_feature (1)..(1): 2'-O-methyl Adenosine
  misc_feature (2)..(2): 2'-O-methyl Guanosine
  misc_feature (3)..(4): 2'-O-methyl Adenosine
  misc_feature (5)..(5): 2'-deoxy-2'-fluoro
  misc_feature (6)..(6): 2'-O-methyl Adenosine
  misc_feature (7)..(7): 2'-deoxy-2'-fluoro
  misc_feature (8)..(8): 2'-O-methyl Guanosine
  misc_feature (9)..(11): 2'-deoxy-2'-fluoro
  misc_feature (12)..(14): 2'-O-methyl Adenosine
  misc_feature (15)..(19): 2'-deoxy-2'-fluoro
  misc_feature (20)..(21): phosphorothioate linkage
agaauacgcucaaauuucctt

SEQ ID NO: 4042 - DNA, 21 bp, Artificial Sequence
  Synthetic
  misc_feature (1)..(3): 2'-O-methyl Adenosine
  misc_feature (4)..(6): 2'-deoxy-2'-fluoro
  misc_feature (7)..(7): 2'-O-methyl Adenosine
  misc_feature (8)..(8): 2'-deoxy-2'-fluoro
  misc_feature (9)..(9): 2'-O-methyl Guanosine
  misc_feature (10)..(10): 2'-deoxy-2'-fluoro
  misc_feature (11)..(11): 2'-O-methyl Adenosine
  misc_feature (12)..(12): 2'-O-methyl Guanosine
  misc_feature (13)..(13): 2'-O-methyl Adenosine
  misc_feature (14)..(14): 2'-O-methyl Guanosine
  misc_feature (15)..(16): 2'-O-methyl Adenosine
  misc_feature (17)..(17): 2'-deoxy-2'-fluoro
  misc_feature (18)..(18): 2'-O-methyl Adenosine
  misc_feature (19)..(19): 2'-deoxy-2'-fluoro
  misc_feature (20)..(21): phosphorothioate linkage
aaauccacguagagaauactt

SEQ ID NO: 4043 - DNA, 21 bp, Artificial Sequence
  Synthetic
  misc_feature (1)..(1): 5'-3 attached inverted deoxyabasic moiety.
  misc_feature (21)..(21): 3'-3 attached inverted deoxyabasic moiety.
ggucccgguuuauaucuautt

SEQ ID NO: 4044 - DNA, 21 bp, Artificial Sequence
  Synthetic
  misc_feature (1)..(1): 5'-3 attached inverted deoxyabasic moiety.
  misc_feature (21)..(21): 3'-3 attached inverted deoxyabasic moiety.
ggaauuggcaagugucuuatt

SEQ ID NO: 4045 - DNA, 21 bp, Artificial Sequence
  Synthetic
  misc_feature (1)..(1): 5'-3 attached inverted deoxyabasic moiety.
  misc_feature (21)..(21): 3'-3 attached inverted deoxyabasic moiety.
cugauugacggaaugugcatt

SEQ ID NO: 4046 - DNA, 21 bp, Artificial Sequence
  Synthetic
  misc_feature (1)..(1): 5'-3 attached inverted deoxyabasic moiety.
  misc_feature (21)..(21): 3'-3 attached inverted deoxyabasic moiety.
cggaaugugcaaaguagcatt

SEQ ID NO: 4047 - DNA, 21 bp, Artificial Sequence
  Synthetic
  misc_feature (1)..(1): 5'-3 attached inverted deoxyabasic moiety.
  misc_feature (21)..(21): 3'-3 attached inverted deoxyabasic moiety.
ggcaguuggcaacacucautt

SEQ ID NO: 4048 - DNA, 21 bp, Artificial Sequence
  Synthetic
  misc_feature (1)..(1): 5'-3 attached inverted deoxyabasic moiety.
  misc_feature (21)..(21): 3'-3 attached inverted deoxyabasic moiety.
gauugcgacggaaauuugatt

SEQ ID NO: 4049 - DNA, 21 bp, Artificial Sequence
  Synthetic
  misc_feature (1)..(1): 5'-3 attached inverted deoxyabasic moiety.
  misc_feature (21)..(21): 3'-3 attached inverted deoxyabasic moiety.
ggaaauuugagcguauucutt

SEQ ID NO: 4050 - DNA, 21 bp, Artificial Sequence
  Synthetic
  misc_feature (1)..(1): 5'-3 attached inverted deoxyabasic moiety.
  misc_feature (21)..(21): 3'-3 attached inverted deoxyabasic moiety.
guauucucuacguggauuutt

SEQ ID NO: 4051 - DNA, 21 bp, Artificial Sequence
  Synthetic
  misc_feature (20)..(21): phosphorothioate linkage
auagauauaaaccgggacctt

SEQ ID NO: 4052 - DNA, 21 bp, Artificial Sequence
  Synthetic
  misc_feature (20)..(21): phosphorothioate linkage
uaagacacuugccaauucctt

SEQ ID NO: 4053 - DNA, 21 bp, Artificial Sequence
  Synthetic
  misc_feature (20)..(21): phosphorothioate linkage
ugcacauuccgucaaucagtt

SEQ ID NO: 4054 - DNA, 21 bp, Artificial Sequence
  Synthetic
  misc_feature (20)..(21): phosphorothioate linkage
ugcuacuuugcacauuccgtt

SEQ ID NO: 4055 - DNA, 21 bp, Artificial Sequence
  Synthetic
  misc_feature (20)..(21): phosphorothioate linkage
augaguguugccaacugcctt

SEQ ID NO: 4056 - DNA, 21 bp, Artificial Sequence
  Synthetic
  misc_feature (20)..(21): phosphorothioate linkage
ucaaauuuccgucgcaauctt

SEQ ID NO: 4057 - DNA, 21 bp, Artificial Sequence
  Synthetic
  misc_feature (20)..(21): phosphorothioate linkage
agaauacgcucaaauuucctt

SEQ ID NO: 4058 - DNA, 21 bp, Artificial Sequence
  Synthetic
  misc_feature (20)..(21): phosphorothioate linkage
aaauccacguagagaauactt

SEQ ID NO: 4059 - DNA, 21 bp, Artificial Sequence
  Synthetic
  misc_feature (1)..(1): 2'-O-methyl Adenosine
  misc_feature (2)..(2): 2'-deoxy-2'-fluoro
  misc_feature (3)..(3): 2'-O-methyl Adenosine
  misc_feature (4)..(4): 2'-O-methyl Guanosine
  misc_feature (5)..(5): 2'-O-methyl Adenosine
  misc_feature (6)..(6): 2'-deoxy-2'-fluoro
  misc_feature (7)..(7): 2'-O-methyl Adenosine
  misc_feature (8)..(8): 2'-deoxy-2'-fluoro
  misc_feature (9)..(11): 2'-O-methyl Adenosine
  misc_feature (12)..(13): 2'-deoxy-2'-fluoro
  misc_feature (14)..(16): 2'-O-methyl Guanosine
  misc_feature (17)..(17): 2'-O-methyl Adenosine
  misc_feature (18)..(19): 2'-deoxy-2'-fluoro
  misc_feature (21)..(21): 3'-3 attached inverted deoxyabasic moiety.
auagauauaaaccgggacctt

SEQ ID NO: 4060 - DNA, 21 bp, Artificial Sequence
  Synthetic
  misc_feature (1)..(1): 2'-deoxy-2'-fluoro
  misc_feature (2)..(3): 2'-O-methyl Adenosine
  misc_feature (4)..(4): 2'-O-methyl Guanosine
  misc_feature (5)..(5): 2'-O-methyl Adenosine
  misc_feature (6)..(6): 2'-deoxy-2'-fluoro
  misc_feature (7)..(7): 2'-O-methyl Adenosine
  misc_feature (8)..(10): 2'-deoxy-2'-fluoro
  misc_feature (11)..(11): 2'-O-methyl Guanosine
  misc_feature (12)..(13): 2'-deoxy-2'-fluoro
  misc_feature (14)..(15): 2'-O-methyl Adenosine
  misc_feature (16)..(19): 2'-deoxy-2'-fluoro
  misc_feature (21)..(21): 3'-3 attached inverted deoxyabasic moiety.
uaagacacuugccaauucctt

SEQ ID NO: 4061 - DNA, 21 bp, Artificial Sequence
  Synthetic
  misc_feature (1)..(1): 2'-deoxy-2'-fluoro
  misc_feature (2)..(2): 2'-O-methyl Guanosine
  misc_feature (3)..(3): 2'-deoxy-2'-fluoro
  misc_feature (4)..(4): 2'-O-methyl Adenosine
  misc_feature (5)..(5): 2'-deoxy-2'-fluoro
  misc_feature (6)..(6): 2'-O-methyl Adenosine
  misc_feature (7)..(10): 2'-deoxy-2'-fluoro
  misc_feature (11)..(11): 2'-O-methyl Guanosine
  misc_feature (12)..(13): 2'-deoxy-2'-fluoro
  misc_feature (14)..(15): 2'-O-methyl Adenosine
  misc_feature (16)..(17): 2'-deoxy-2'-fluoro
  misc_feature (18)..(18): 2'-O-methyl Adenosine
  misc_feature (19)..(19): 2'-O-methyl Guanosine
  misc_feature (21)..(21): 3'-3 attached inverted deoxyabasic moiety.
ugcacauuccgucaaucagtt

SEQ ID NO: 4062 - DNA, 21 bp, Artificial Sequence
  Synthetic
  misc_feature (1)..(1): 2'-deoxy-2'-fluoro
  misc_feature (2)..(2): 2'-O-methyl Guanosine
  misc_feature (3)..(4): 2'-deoxy-2'-fluoro
  misc_feature (5)..(5): 2'-O-methyl Adenosine
  misc_feature (6)..(9): 2'-deoxy-2'-fluoro
  misc_feature (10)..(10): 2'-O-methyl Guanosine
  misc_feature (11)..(11): 2'-deoxy-2'-fluoro
  misc_feature (12)..(12): 2'-O-methyl Adenosine
  misc_feature (13)..(13): 2'-deoxy-2'-fluoro
  misc_feature (14)..(14): 2'-O-methyl Adenosine
  misc_feature (15)..(18): 2'-deoxy-2'-fluoro
  misc_feature (19)..(19): 2'-O-methyl Guanosine
  misc_feature (21)..(21): 3'-3 attached inverted deoxyabasic moiety.
ugcuacuuugcacauuccgtt

SEQ ID NO: 4063 - DNA, 21 bp, Artificial Sequence
  Synthetic
  misc_feature (1)..(1): 2'-O-methyl Adenosine
  misc_feature (2)..(2): 2'-deoxy-2'-fluoro
  misc_feature (3)..(3): 2'-O-methyl Guanosine
  misc_feature (4)..(4): 2'-O-methyl Adenosine
  misc_feature (5)..(5): 2'-O-methyl Guanosine
  misc_feature (6)..(6): 2'-deoxy-2'-fluoro
  misc_feature (7)..(7): 2'-O-methyl Guanosine
  misc_feature (8)..(9): 2'-deoxy-2'-fluoro
  misc_feature (10)..(10): 2'-O-methyl Guanosine
  misc_feature (11)..(12): 2'-deoxy-2'-fluoro
  misc_feature (13)..(14): 2'-O-methyl Adenosine
  misc_feature (15)..(16): 2'-deoxy-2'-fluoro
  misc_feature (17)..(17): 2'-O-methyl Guanosine
  misc_feature (18)..(19): 2'-deoxy-2'-fluoro
  misc_feature (21)..(21): 3'-3 attached inverted deoxyabasic moiety.
augaguguugccaacugcctt

SEQ ID NO: 4064 - DNA, 21 bp, Artificial Sequence
  Synthetic
  misc_feature (21)..(21): 3'-3 attached inverted deoxyabasic moiety.
ucaaauuuccgucgcaauctt

SEQ ID NO: 4065 - DNA, 21 bp, Artificial Sequence
  Synthetic
  misc_feature (21)..(21): 3'-3 attached inverted deoxyabasic moiety.
agaauacgcucaaauuucctt

SEQ ID NO: 4066 - DNA, 21 bp, Artificial Sequence
  Synthetic
  misc_feature (21)..(21): 3'-3 attached inverted deoxyabasic moiety.
aaauccacguagagaauactt

SEQ ID NO: 4067 - DNA, 21 bp, Artificial Sequence
  Synthetic
  misc_feature (21)..(21): 3'-3 attached inverted deoxyabasic moiety.
auagauauaaaccgggacctt

SEQ ID NO: 4068 - DNA, 21 bp, Artificial Sequence
  Synthetic
  misc_feature (21)..(21): 3'-3 attached inverted deoxyabasic moiety.
uaagacacuugccaauucctt

SEQ ID NO: 4069 - DNA, 21 bp, Artificial Sequence
  Synthetic
  misc_feature (21)..(21): 3'-3 attached inverted deoxyabasic moiety.
ugcacauuccgucaaucagtt

SEQ ID NO: 4070 - DNA, 21 bp, Artificial Sequence
  Synthetic
  misc_feature (21)..(21): 3'-3 attached inverted deoxyabasic moiety.
ugcuacuuugcacauuccgtt

SEQ ID NO: 4071 - DNA, 21 bp, Artificial Sequence
  Synthetic
  misc_feature (21)..(21): 3'-3 attached inverted deoxyabasic moiety.
augaguguugccaacugcctt

SEQ ID NO: 4072 - DNA, 21 bp, Artificial Sequence
  Synthetic
  misc_feature (21)..(21): 3'-3 attached inverted deoxyabasic moiety.
ucaaauuuccgucgcaauctt

SEQ ID NO: 4073 - DNA, 21 bp, Artificial Sequence
  Synthetic
  misc_feature (21)..(21): 3'-3 attached inverted deoxyabasic moiety.
agaauacgcucaaauuucctt

SEQ ID NO: 4074 - DNA, 21 bp, Artificial Sequence
  Synthetic
  misc_feature (21)..(21): 3'-3 attached inverted deoxyabasic moiety.
aaauccacguagagaauactt

SEQ ID NO: 4075 - DNA, 21 bp, Artificial Sequence
  Synthetic
auagauauaaaccgggacctt

SEQ ID NO: 4076 - DNA, 21 bp, Artificial Sequence
  Synthetic
uaagacacuugccaauucctt

SEQ ID NO: 4077 - DNA, 21 bp, Artificial Sequence
  Synthetic
ugcacauuccgucaaucagtt

SEQ ID NO: 4078 - DNA, 21 bp, Artificial Sequence
  Synthetic
ugcuacuuugcacauuccgtt

SEQ ID NO: 4079 - DNA, 21 bp, Artificial Sequence
  Synthetic
augaguguugccaacugcctt

SEQ ID NO: 4080 - DNA, 21 bp, Artificial Sequence
  Synthetic
ucaaauuuccgucgcaauctt

SEQ ID NO: 4081 - DNA, 21 bp, Artificial Sequence
  Synthetic
agaauacgcucaaauuucctt

SEQ ID NO: 4082 - DNA, 21 bp, Artificial Sequence
  Synthetic
aaauccacguagagaauactt

SEQ ID NO: 4083 - RNA, 19 nt, Artificial Sequence
  Synthetic
ggaagagaggcacagacac

SEQ ID NO: 4084 - RNA, 19 nt, Artificial Sequence
  Synthetic
cagauaggagaagggcacc

SEQ ID NO: 4085 - RNA, 19 nt, Artificial Sequence
  Synthetic
cggcuggagccacuugcag

SEQ ID NO: 4086 - RNA, 19 nt, Artificial Sequence
  Synthetic
ggacugaggguuuuugcaa

SEQ ID NO: 4087 - RNA, 19 nt, Artificial Sequence
  Synthetic
acaaaacccuagcagccug

SEQ ID NO: 4088 - RNA, 19 nt, Artificial Sequence
  Synthetic
gaagaacucuaagccagau

SEQ ID NO: 4089 - RNA, 19 nt, Artificial Sequence
  Synthetic
ugggguggcuggacgagag

SEQ ID NO: 4090 - RNA, 19 nt, Artificial Sequence
  Synthetic
gcagcucuuggcucagcaa

SEQ ID NO: 4091 - RNA, 19 nt, Artificial Sequence
  Synthetic
aagaaugcacaguaugauc

SEQ ID NO: 4092 - RNA, 19 nt, Artificial Sequence
  Synthetic
cagcucaguggaugugaag

SEQ ID NO: 4093 - RNA, 19 nt, Artificial Sequence
  Synthetic
gucagaaguuccugugggc

SEQ ID NO: 4094 - RNA, 19 nt, Artificial Sequence
  Synthetic
ccuggagcccaucucaccu

SEQ ID NO: 4095 - RNA, 19 nt, Artificial Sequence
  Synthetic
uuuagaccuaaggacagac

SEQ ID NO: 4096 - RNA, 19 nt, Artificial Sequence
  Synthetic
ccucaggaugaugaugccc

SEQ ID NO: 4097 - RNA, 19 nt, Artificial Sequence
  Synthetic
cgugguggacccuguuguc

SEQ ID NO: 4098 - RNA, 19 nt, Artificial Sequence
  Synthetic
ccgugagaagcaauugcag

SEQ ID NO: 4099 - RNA, 19 nt, Artificial Sequence
  Synthetic
gcaggaauuacuucuuauc

SEQ ID NO: 4100 - RNA, 19 nt, Artificial Sequence
  Synthetic
ccagcagcagcaacaaauc

SEQ ID NO: 4101 - RNA, 19 nt, Artificial Sequence
  Synthetic
ccagaagcagcuucugaua

SEQ ID NO: 4102 - RNA, 19 nt, Artificial Sequence
  Synthetic
agcagaguuucagaaacag

SEQ ID NO: 4103 - RNA, 19 nt, Artificial Sequence
  Synthetic
gcaugagaacuugacacgg

SEQ ID NO: 4104 - RNA, 19 nt, Artificial Sequence
  Synthetic
gcagcaccaggcucagcuu

SEQ ID NO: 4105 - RNA, 19 nt, Artificial Sequence
  Synthetic
ucaggagcauaucaaggaa

SEQ ID NO: 4106 - RNA, 19 nt, Artificial Sequence
  Synthetic
acuucuagccauaaaacag

SEQ ID NO: 4107 - RNA, 19 nt, Artificial Sequence
  Synthetic
gcaacaagaacuccuagaa

SEQ ID NO: 4108 - RNA, 19 nt, Artificial Sequence
  Synthetic
aaaggagcagaaacuggag

SEQ ID NO: 4109 - RNA, 19 nt, Artificial Sequence
  Synthetic
gcagcagaggcaagaacag

SEQ ID NO: 4110 - RNA, 19 nt, Artificial Sequence
  Synthetic
ggaaguagagaggcaucgc

SEQ ID NO: 4111 - RNA, 19 nt, Artificial Sequence
  Synthetic
cagagaacagcagcuuccu

SEQ ID NO: 4112 - RNA, 19 nt, Artificial Sequence
  Synthetic
uccucucagaggcaaagau

SEQ ID NO: 4113 - RNA, 19 nt, Artificial Sequence
  Synthetic
uagaggacgagaaagggca

SEQ ID NO: 4114 - RNA, 19 nt, Artificial Sequence
  Synthetic
aguggcaaguacagaagua

SEQ ID NO: 4115 - RNA, 19 nt, Artificial Sequence
  Synthetic
aaagcagaagcuucaagag

SEQ ID NO: 4116 - RNA, 19 nt, Artificial Sequence
  Synthetic
guuccuacugaguaaauca

SEQ ID NO: 4117 - RNA, 19 nt, Artificial Sequence
  Synthetic
agcaacgaaagacacucca

SEQ ID NO: 4118 - RNA, 19 nt, Artificial Sequence
  Synthetic
aacuaauggaaaaaaucau

SEQ ID NO: 4119 - RNA, 19 nt, Artificial Sequence
  Synthetic
uuccgugagccgccauccc

SEQ ID NO: 4120 - RNA, 19 nt, Artificial Sequence
  Synthetic
caagcucugguacacggcu

SEQ ID NO: 4121 - RNA, 19 nt, Artificial Sequence
  Synthetic
ugcccaccacacaucauug

SEQ ID NO: 4122 - RNA, 19 nt, Artificial Sequence
  Synthetic
ggaucaaagcucuccaccc

SEQ ID NO: 4123 - RNA, 19 nt, Artificial Sequence
  Synthetic
ccuuaguggaacaucucca

SEQ ID NO: 4124 - RNA, 19 nt, Artificial Sequence
  Synthetic
auccuacaaguacacauua

SEQ ID NO: 4125 - RNA, 19 nt, Artificial Sequence
  Synthetic
accaggagcacaagaugca

SEQ ID NO: 4126 - RNA, 19 nt, Artificial Sequence
  Synthetic
aaaggaugauuucccccuu

SEQ ID NO: 4127 - RNA, 19 nt, Artificial Sequence
  Synthetic
ucgaaaaacugccucugag

SEQ ID NO: 4128 - RNA, 19 nt, Artificial Sequence
  Synthetic
gcccaacuugaaggugcgg

SEQ ID NO: 4129 - RNA, 19 nt, Artificial Sequence
  Synthetic
guccagguuaaaacagaaa

SEQ ID NO: 4130 - RNA, 19 nt, Artificial Sequence
  Synthetic
aguggcagagaggagaagc

SEQ ID NO: 4131 - RNA, 19 nt, Artificial Sequence
  Synthetic
cagccccuuacucaggcgg

SEQ ID NO: 4132 - RNA, 19 nt, Artificial Sequence
  Synthetic
gaaggauggaaauguuguc

SEQ ID NO: 4133 - RNA, 19 nt, Artificial Sequence
  Synthetic
cacuucauucaagaagcga

SEQ ID NO: 4134 - RNA, 19 nt, Artificial Sequence
  Synthetic
aauguuugaggugacagaa

SEQ ID NO: 4135 - RNA, 19 nt, Artificial Sequence
  Synthetic
auccucagucaguagcagu

SEQ ID NO: 4136 - RNA, 19 nt, Artificial Sequence
  Synthetic
uucuccaggcucugguccc

SEQ ID NO: 4137 - RNA, 19 nt, Artificial Sequence
  Synthetic
caguucaccaaacaauggg

SEQ ID NO: 4138 - RNA, 19 nt, Artificial Sequence
  Synthetic
gccaacuggaaguguuacu

SEQ ID NO: 4139 - RNA, 19 nt, Artificial Sequence
  Synthetic
ugaaaaugagacuucgguu

SEQ ID NO: 4140 - RNA, 19 nt, Artificial Sequence
  Synthetic
uuugcccccuaccccucau

SEQ ID NO: 4141 - RNA, 19 nt, Artificial Sequence
  Synthetic
ugccgagcaaaugguuuca

SEQ ID NO: 4142 - RNA, 19 nt, Artificial Sequence
  Synthetic
acagcaacgcauucuaauu

SEQ ID NO: 4143 - RNA, 19 nt, Artificial Sequence
  Synthetic
ucaugaagauuccaugaac

SEQ ID NO: 4144 - RNA, 19 nt, Artificial Sequence
  Synthetic
ccugcuaagucuuuauacc

SEQ ID NO: 4145 - RNA, 19 nt, Artificial Sequence
  Synthetic
cucuccuucuuugcccaac

SEQ ID NO: 4146 - RNA, 19 nt, Artificial Sequence
  Synthetic
cauuaccuuggggcuuccc

SEQ ID NO: 4147 - RNA, 19 nt, Artificial Sequence
  Synthetic
cgcagugccaucccagcuc

SEQ ID NO: 4148 - RNA, 19 nt, Artificial Sequence
  Synthetic
caaugcuucgaauucacuc

SEQ ID NO: 4149 - RNA, 19 nt, Artificial Sequence
  Synthetic
caaagaaaagcagaagugu

SEQ ID NO: 4150 - RNA, 19 nt, Artificial Sequence
  Synthetic
ugagacgcagacgcuuagg

SEQ ID NO: 4151 - RNA, 19 nt, Artificial Sequence
  Synthetic
gcaagguguuccucugccu

SEQ ID NO: 4152 - RNA, 19 nt, Artificial Sequence
  Synthetic
ugggcaguauggaggcagc

SEQ ID NO: 4153 - RNA, 19 nt, Artificial Sequence
  Synthetic
caucccggcaucuuccagc

SEQ ID NO: 4154 - RNA, 19 nt, Artificial Sequence
  Synthetic
ccacccucauguuacuuua

SEQ ID NO: 4155 - RNA, 19 nt, Artificial Sequence
  Synthetic
agagggaaagccacccaac

SEQ ID NO: 4156 - RNA, 19 nt, Artificial Sequence
  Synthetic
cagcagccaccaggcucuc

SEQ ID NO: 4157 - RNA, 19 nt, Artificial Sequence
  Synthetic
ccugcagcauuuauuauug

SEQ ID NO: 4158 - RNA, 19 nt, Artificial Sequence
  Synthetic
gaaagaacaaaugcgacag

SEQ ID NO: 4159 - RNA, 19 nt, Artificial Sequence
  Synthetic
gcaaaagcuucuuguagcu

SEQ ID NO: 4160 - RNA, 19 nt, Artificial Sequence
  Synthetic
ugguggaguucccuuacau

SEQ ID NO: 4161 - RNA, 19 nt, Artificial Sequence
  Synthetic
uccucagucucccuuggca

SEQ ID NO: 4162 - RNA, 19 nt, Artificial Sequence
  Synthetic
aacaaaagagagaauuuca

SEQ ID NO: 4163 - RNA, 19 nt, Artificial Sequence
  Synthetic
accuggcauuagagguacc

SEQ ID NO: 4164 - RNA, 19 nt, Artificial Sequence
  Synthetic
ccacaaauugccccgucac

SEQ ID NO: 4165 - RNA, 19 nt, Artificial Sequence
  Synthetic
cagaccccugaaccgaacc

SEQ ID NO: 4166 - RNA, 19 nt, Artificial Sequence
  Synthetic
ccagucugcaccuuugccu

SEQ ID NO: 4167 - RNA, 19 nt, Artificial Sequence
  Synthetic
ucagagcacguuggcucag

SEQ ID NO: 4168 - RNA, 19 nt, Artificial Sequence
  Synthetic
gcuggucauucaacagcaa

SEQ ID NO: 4169 - RNA, 19 nt, Artificial Sequence
  Synthetic
acaccagcaauucuuggag

SEQ ID NO: 4170 - RNA, 19 nt, Artificial Sequence
  Synthetic
gaagcagaagcaauaccag

SEQ ID NO: 4171 - RNA, 19 nt, Artificial Sequence
  Synthetic
gcagcagauccacaugaac

SEQ ID NO: 4172 - RNA, 19 nt, Artificial Sequence
  Synthetic
caaacugcuuucgaaaucu

SEQ ID NO: 4173 - RNA, 19 nt, Artificial Sequence
  Synthetic
uauugaacaacugaagcaa

SEQ ID NO: 4174 - RNA, 19 nt, Artificial Sequence
  Synthetic
accaggcagucaccuugag

SEQ ID NO: 4175 - RNA, 19 nt, Artificial Sequence
  Synthetic
ggaagcagaggaagagcuu

SEQ ID NO: 4176 - RNA, 19 nt, Artificial Sequence
  Synthetic
ucagggggaccaggcgaug

SEQ ID NO: 4177 - RNA, 19 nt, Artificial Sequence
  Synthetic
gcaggaagacagagcgccc

SEQ ID NO: 4178 - RNA, 19 nt, Artificial Sequence
  Synthetic
cucuaguggcaacagcacu

SEQ ID NO: 4179 - RNA, 19 nt, Artificial Sequence
  Synthetic
uaggagcgacagcagugcu

SEQ ID NO: 4180 - RNA, 19 nt, Artificial Sequence
  Synthetic
uuguguggaugacacacug

SEQ ID NO: 4181 - RNA, 19 nt, Artificial Sequence
  Synthetic
gggacaaguuggggcugug

SEQ ID NO: 4182 - RNA, 19 nt, Artificial Sequence
  Synthetic
gaaggucaaggaggaacca

SEQ ID NO: 4183 - RNA, 19 nt, Artificial Sequence
  Synthetic
aguggacagugaugaagau

SEQ ID NO: 4184 - RNA, 19 nt, Artificial Sequence
  Synthetic
ugcucagauccaggaaaug

SEQ ID NO: 4185 - RNA, 19 nt, Artificial Sequence
  Synthetic
ggaaucuggggagcaggcu

SEQ ID NO: 4186 - RNA, 19 nt, Artificial Sequence
  Synthetic
ugcuuuuaugcaacagccu

SEQ ID NO: 4187 - RNA, 19 nt, Artificial Sequence
  Synthetic
uuuccuggaacccacgcac

SEQ ID NO: 4188 - RNA, 19 nt, Artificial Sequence
  Synthetic
cacacgugcgcucucugug

SEQ ID NO: 4189 - RNA, 19 nt, Artificial Sequence
  Synthetic
gcgccaagcuccgcuggcu

SEQ ID NO: 4190 - RNA, 19 nt, Artificial Sequence
  Synthetic
ugcgguuggcauggaugga

SEQ ID NO: 4191 - RNA, 19 nt, Artificial Sequence
  Synthetic
auuagagaaacaccgucuc

SEQ ID NO: 4192 - RNA, 19 nt, Artificial Sequence
  Synthetic
cgucuccaggacucacucu

SEQ ID NO: 4193 - RNA, 19 nt, Artificial Sequence
  Synthetic
uuccccugcugccucuguu

SEQ ID NO: 4194 - RNA, 19 nt, Artificial Sequence
  Synthetic
uuuaccucacccagcaaug

SEQ ID NO: 4195 - RNA, 19 nt, Artificial Sequence
  Synthetic
ggaccgcccccuccagccu

SEQ ID NO: 4196 - RNA, 19 nt, Artificial Sequence
  Synthetic
uggcucugcaacuggaauu

SEQ ID NO: 4197 - RNA, 19 nt, Artificial Sequence
  Synthetic
ugccuaugaccccuugaug

SEQ ID NO: 4198 - RNA, 19 nt, Artificial Sequence
  Synthetic
gcugaaacaccagugcguu

SEQ ID NO: 4199 - RNA, 19 nt, Artificial Sequence
  Synthetic
uuguggcaauuccaccacc

SEQ ID NO: 4200 - RNA, 19 nt, Artificial Sequence
  Synthetic
ccacccugagcaugcugga

SEQ ID NO: 4201 - RNA, 19 nt, Artificial Sequence
  Synthetic
acgaauacagaguaucugg

SEQ ID NO: 4202 - RNA, 19 nt, Artificial Sequence
  Synthetic
gucacgacugcaagaaacu

SEQ ID NO: 4203 - RNA, 19 nt, Artificial Sequence
  Synthetic
ugggcugcuaaauaaaugu

SEQ ID NO: 4204 - RNA, 19 nt, Artificial Sequence
  Synthetic
ugagcgaauucaaggucga

SEQ ID NO: 4205 - RNA, 19 nt, Artificial Sequence
  Synthetic
aaaagccagccuggaggaa

SEQ ID NO: 4206 - RNA, 19 nt, Artificial Sequence
  Synthetic
aauacagcuuguucauucu

SEQ ID NO: 4207 - RNA, 19 nt, Artificial Sequence
  Synthetic
ugaacaucacucacuguug

SEQ ID NO: 4208 - RNA, 19 nt, Artificial Sequence
  Synthetic
guauggcaccaacccccug

SEQ ID NO: 4209 - RNA, 19 nt, Artificial Sequence
  Synthetic
ggacggacagaagcuggac

SEQ ID NO: 4210 - RNA, 19 nt, Artificial Sequence
  Synthetic
ccccaggauacuccuaggu

SEQ ID NO: 4211 - RNA, 19 nt, Artificial Sequence
  Synthetic
ugaugacucucaaaaguuu

SEQ ID NO: 4212 - RNA, 19 nt, Artificial Sequence
  Synthetic
uuuuuccucauuaccuugu

SEQ ID NO: 4213 - RNA, 19 nt, Artificial Sequence
  Synthetic
ugguggacuugggguggac

SEQ ID NO: 4214 - RNA, 19 nt, Artificial Sequence
  Synthetic
cagugacaccauuuggaau

SEQ ID NO: 4215 - RNA, 19 nt, Artificial Sequence
  Synthetic
ugagcuacacucguccggu

SEQ ID NO: 4216 - RNA, 19 nt, Artificial Sequence
  Synthetic
ugcugcacgcauggcuguu

SEQ ID NO: 4217 - RNA, 19 nt, Artificial Sequence
  Synthetic
uggcugugucaucgagcug

SEQ ID NO: 4218 - RNA, 19 nt, Artificial Sequence
  Synthetic
ggcuuccaaaguggccuca

SEQ ID NO: 4219 - RNA, 19 nt, Artificial Sequence
  Synthetic
aggagagcugaagaauggg

SEQ ID NO: 4220 - RNA, 19 nt, Artificial Sequence
  Synthetic
guuugcuguugugaggccc

SEQ ID NO: 4221 - RNA, 19 nt, Artificial Sequence
  Synthetic
cccuggccaucacgcugaa

SEQ ID NO: 4222 - RNA, 19 nt, Artificial Sequence
  Synthetic
agaauccacagccaugggg

SEQ ID NO: 4223 - RNA, 19 nt, Artificial Sequence
  Synthetic
guucugcuuuuuuaauuca

SEQ ID NO: 4224 - RNA, 19 nt, Artificial Sequence
  Synthetic
aguugcaauuaccgccaaa

SEQ ID NO: 4225 - RNA, 19 nt, Artificial Sequence
  Synthetic
auacuugagagaccaacua

SEQ ID NO: 4226 - RNA, 19 nt, Artificial Sequence
  Synthetic
aaauauaagcaagauauug

SEQ ID NO: 4227 - RNA, 19 nt, Artificial Sequence
  Synthetic
gauuguagaucuggauguu

SEQ ID NO: 4228 - RNA, 19 nt, Artificial Sequence
  Synthetic
ucaccauggaaacgguacc

SEQ ID NO: 4229 - RNA, 19 nt, Artificial Sequence
  Synthetic
ccagcaggccuuuuaugcu

SEQ ID NO: 4230 - RNA, 19 nt, Artificial Sequence
  Synthetic
ugaccccagcauccuguac

SEQ ID NO: 4231 - RNA, 19 nt, Artificial Sequence
  Synthetic
cauuucacuccaucgcuau

SEQ ID NO: 4232 - RNA, 19 nt, Artificial Sequence
  Synthetic
ugaugaagggaacuuuuuc

SEQ ID NO: 4233 - RNA, 19 nt, Artificial Sequence
  Synthetic
cccuggcaguggagcccca

SEQ ID NO: 4234 - RNA, 19 nt, Artificial Sequence
  Synthetic
aaaugagguuggaacaggc

SEQ ID NO: 4235 - RNA, 19 nt, Artificial Sequence
  Synthetic
ccuuggagaaggguacaau

SEQ ID NO: 4236 - RNA, 19 nt, Artificial Sequence
  Synthetic
uauaaauauugccuggaca

SEQ ID NO: 4237 - RNA, 19 nt, Artificial Sequence
  Synthetic
agguggccuugauccuccc

SEQ ID NO: 4238 - RNA, 19 nt, Artificial Sequence
  Synthetic
caugggagauguugaguac

SEQ ID NO: 4239 - RNA, 19 nt, Artificial Sequence
  Synthetic
ccuugaagcauucaggacc

SEQ ID NO: 4240 - RNA, 19 nt, Artificial Sequence
  Synthetic
caucgugaagccuguggcc

SEQ ID NO: 4241 - RNA, 19 nt, Artificial Sequence
  Synthetic
caaagaguuugauccagac

SEQ ID NO: 4242 - RNA, 19 nt, Artificial Sequence
  Synthetic
cauggucuuaguaucugcu

SEQ ID NO: 4243 - RNA, 19 nt, Artificial Sequence
  Synthetic
uggauuugaugcauuggaa

SEQ ID NO: 4244 - RNA, 19 nt, Artificial Sequence
  Synthetic
aggccacaccccuccucua

SEQ ID NO: 4245 - RNA, 19 nt, Artificial Sequence
  Synthetic
aggaggguacaaagugacg

SEQ ID NO: 4246 - RNA, 19 nt, Artificial Sequence
  Synthetic
ggcaaaauguuuuggucau

SEQ ID NO: 4247 - RNA, 19 nt, Artificial Sequence
  Synthetic
uuugacgaagcaauugaug

SEQ ID NO: 4248 - RNA, 19 nt, Artificial Sequence
  Synthetic
gacauuggcugauggacgu

SEQ ID NO: 4249 - RNA, 19 nt, Artificial Sequence
  Synthetic
ugugguguuggcucuagaa

SEQ ID NO: 4250 - RNA, 19 nt, Artificial Sequence
  Synthetic
aggaggacaugaucucaca

SEQ ID NO: 4251 - RNA, 19 nt, Artificial Sequence
  Synthetic
agccaucugugaugcauca

SEQ ID NO: 4252 - RNA, 19 nt, Artificial Sequence
  Synthetic
agaagccuguguaaaugcc

SEQ ID NO: 4253 - RNA, 19 nt, Artificial Sequence
  Synthetic
ccuucuaggaaaugagcug

SEQ ID NO: 4254 - RNA, 19 nt, Artificial Sequence
  Synthetic
ggagccacuugcagaagau

SEQ ID NO: 4255 - RNA, 19 nt, Artificial Sequence
  Synthetic
uauucuccaccaaagcccg

SEQ ID NO: 4256 - RNA, 19 nt, Artificial Sequence
  Synthetic
gaauaugaaugcuguuauu

SEQ ID NO: 4257 - RNA, 19 nt, Artificial Sequence
  Synthetic
uucuuuacagaagaucauu

SEQ ID NO: 4258 - RNA, 19 nt, Artificial Sequence
  Synthetic
ugaaauucaaagcaaguau

SEQ ID NO: 4259 - RNA, 19 nt, Artificial Sequence
  Synthetic
uuggaagucaguaaggaug

SEQ ID NO: 4260 - RNA, 19 nt, Artificial Sequence
  Synthetic
gguggcugugccaaggggc

SEQ ID NO: 4261 - RNA, 19 nt, Artificial Sequence
  Synthetic
cugugcucuggcuggugcu

SEQ ID NO: 4262 - RNA, 19 nt, Artificial Sequence
  Synthetic
ucaguugcaagaggagaca

SEQ ID NO: 4263 - RNA, 19 nt, Artificial Sequence
  Synthetic
agagaccguuucugcccug

SEQ ID NO: 4264 - RNA, 19 nt, Artificial Sequence
  Synthetic
ggccucccuaacaguggau

SEQ ID NO: 4265 - RNA, 19 nt, Artificial Sequence
  Synthetic
uguggaacagcccuuugcu

SEQ ID NO: 4266 - RNA, 19 nt, Artificial Sequence
  Synthetic
ucaggaagacagcagaacu

SEQ ID NO: 4267 - RNA, 19 nt, Artificial Sequence
  Synthetic
ugcuggugagccuauggaa

SEQ ID NO: 4268 - RNA, 19 nt, Artificial Sequence
  Synthetic
agaggagccagccuuguga

SEQ ID NO: 4269 - RNA, 19 nt, Artificial Sequence
  Synthetic
aagugccaagucccccucu

SEQ ID NO: 4270 - RNA, 19 nt, Artificial Sequence
  Synthetic
ugauauuuccuguguguga

SEQ ID NO: 4271 - RNA, 19 nt, Artificial Sequence
  Synthetic
acaucauuguguauccccc

SEQ ID NO: 4272 - RNA, 19 nt, Artificial Sequence
  Synthetic
ccaccccaguacccucaga

SEQ ID NO: 4273 - RNA, 19 nt, Artificial Sequence
  Synthetic
acaugucuugucugcugcc

SEQ ID NO: 4274 - RNA, 19 nt, Artificial Sequence
  Synthetic
cuggguggcacagauucaa

SEQ ID NO: 4275 - RNA, 19 nt, Artificial Sequence
  Synthetic
auggaacauaaacacuggg

SEQ ID NO: 4276 - RNA, 19 nt, Artificial Sequence
  Synthetic
gcacaaaauucugaacagc

SEQ ID NO: 4277 - RNA, 19 nt, Artificial Sequence
  Synthetic
cagcuucacuuguucuuug

SEQ ID NO: 4278 - RNA, 19 nt, Artificial Sequence
  Synthetic
ggauggacuugaaagggca

SEQ ID NO: 4279 - RNA, 19 nt, Artificial Sequence
  Synthetic
auuaaagauuccuuaaacg

SEQ ID NO: 4280 - RNA, 19 nt, Artificial Sequence
  Synthetic
guaaccgcugugauucuag

SEQ ID NO: 4281 - RNA, 19 nt, Artificial Sequence
  Synthetic
gaguuacaguaaaccacga

SEQ ID NO: 4282 - RNA, 19 nt, Artificial Sequence
  Synthetic
auuggaagaaacugcuucc

SEQ ID NO: 4283 - RNA, 19 nt, Artificial Sequence
  Synthetic
cagcaugcuuuuaauaugc

SEQ ID NO: 4284 - RNA, 19 nt, Artificial Sequence
  Synthetic
cugggugacccacuccuag

SEQ ID NO: 4285 - RNA, 19 nt, Artificial Sequence
  Synthetic
gacaccaaguuugaacuag

SEQ ID NO: 4286 - RNA, 19 nt, Artificial Sequence
  Synthetic
gaaacauucaguacagcac

SEQ ID NO: 4287 - RNA, 19 nt, Artificial Sequence
  Synthetic
cuagauauuguuaauuuca

SEQ ID NO: 4288 - RNA, 19 nt, Artificial Sequence
  Synthetic
agaagcuaugacagccagu

SEQ ID NO: 4289 - RNA, 19 nt, Artificial Sequence
  Synthetic
ugaaauuuugggcaaaacc

SEQ ID NO: 4290 - RNA, 19 nt, Artificial Sequence
  Synthetic
cugagacauagucauuccu

SEQ ID NO: 4291 - RNA, 19 nt, Artificial Sequence
  Synthetic
ugacauucugaucagcuuu

SEQ ID NO: 4292 - RNA, 19 nt, Artificial Sequence
  Synthetic
uuuuugggguaauuuguuu

SEQ ID NO: 4293 - RNA, 19 nt, Artificial Sequence
  Synthetic
uuucaaacagucuuaacuu

SEQ ID NO: 4294 - RNA, 19 nt, Artificial Sequence
  Synthetic
uguuuacaagauuugcuuu

SEQ ID NO: 4295 - RNA, 19 nt, Artificial Sequence
  Synthetic
uuagcuaugaacggaucgu

SEQ ID NO: 4296 - RNA, 19 nt, Artificial Sequence
  Synthetic
uaauuccacccagaaugua

SEQ ID NO: 4297 - RNA, 19 nt, Artificial Sequence
  Synthetic
aauguuucuuguuuguuug

SEQ ID NO: 4298 - RNA, 19 nt, Artificial Sequence
  Synthetic
guuuuguuuuguuaggguu

SEQ ID NO: 4299 - RNA, 19 nt, Artificial Sequence
  Synthetic
uuuuuucucaacuuuaaca

SEQ ID NO: 4300 - RNA, 19 nt, Artificial Sequence
  Synthetic
acacaguucaacuguuccu

SEQ ID NO: 4301 - RNA, 19 nt, Artificial Sequence
  Synthetic
uaguaaaaguucaagaugg

SEQ ID NO: 4302 - RNA, 19 nt, Artificial Sequence
  Synthetic
gaggaacuagcaugaggcu

SEQ ID NO: 4303 - RNA, 19 nt, Artificial Sequence
  Synthetic
uuuuuucaguaucucgaag

SEQ ID NO: 4304 - RNA, 19 nt, Artificial Sequence
  Synthetic
guccaaaugccaaaggaac

SEQ ID NO: 4305 - RNA, 19 nt, Artificial Sequence
  Synthetic
ccucacacacuguuuguaa

SEQ ID NO: 4306 - RNA, 19 nt, Artificial Sequence
  Synthetic
auggugcaauauuuuauau

SEQ ID NO: 4307 - RNA, 19 nt, Artificial Sequence
  Synthetic
ucacuuuuuuuuaaacauc

SEQ ID NO: 4308 - RNA, 19 nt, Artificial Sequence
  Synthetic
ccccaacaucuuuguguuc

SEQ ID NO: 4309 - RNA, 19 nt, Artificial Sequence
  Synthetic
cucacacacaggcaauuug

SEQ ID NO: 4310 - RNA, 19 nt, Artificial Sequence
  Synthetic
gcaauguugcaauuguguu

SEQ ID NO: 4311 - RNA, 19 nt, Artificial Sequence
  Synthetic
uggagaaugaagucccccc

SEQ ID NO: 4312 - RNA, 19 nt, Artificial Sequence
  Synthetic
caccucccagccacacaca

SEQ ID NO: 4313 - RNA, 19 nt, Artificial Sequence
  Synthetic
acauccuuuguucucauga

SEQ ID NO: 4314 - RNA, 19 nt, Artificial Sequence
  Synthetic
acaguaggucugagcaaau

SEQ ID NO: 4315 - RNA, 19 nt, Artificial Sequence
  Synthetic
uguuccaccaagcauuuuc

SEQ ID NO: 4316 - RNA, 19 nt, Artificial Sequence
  Synthetic
cagugucuuugaaaagcac

SEQ ID NO: 4317 - RNA, 19 nt, Artificial Sequence
  Synthetic
cguaacuuuucaaaggugg

SEQ ID NO: 4318 - RNA, 19 nt, Artificial Sequence
  Synthetic
gucuuaauuuguugcauau

SEQ ID NO: 4319 - RNA, 19 nt, Artificial Sequence
  Synthetic
ucuaucaaggacuuauuca

SEQ ID NO: 4320 - RNA, 19 nt, Artificial Sequence
  Synthetic
acucaccuuuccuuuucug

SEQ ID NO: 4321 - RNA, 19 nt, Artificial Sequence
  Synthetic
gcccucuaucaauugauuu

SEQ ID NO: 4322 - RNA, 19 nt, Artificial Sequence
  Synthetic
ucuucuuaccuuucaucau

SEQ ID NO: 4323 - RNA, 19 nt, Artificial Sequence
  Synthetic
uucauuccuuccuuuagaa

SEQ ID NO: 4324 - RNA, 19 nt, Artificial Sequence
  Synthetic
aaaacugaagauuacccau

SEQ ID NO: 4325 - RNA, 19 nt, Artificial Sequence
  Synthetic
uaaucuccucuuauuacuu

SEQ ID NO: 4326 - RNA, 19 nt, Artificial Sequence
  Synthetic
ugagggccuugacuauuua

SEQ ID NO: 4327 - RNA, 19 nt, Artificial Sequence
  Synthetic
aguuuauuuuguuuacuuu

SEQ ID NO: 4328 - RNA, 19 nt, Artificial Sequence
  Synthetic
uacagguuaacacaguugu

SEQ ID NO: 4329 - RNA, 19 nt, Artificial Sequence
  Synthetic
uuuugucugauugcauuuu

SEQ ID NO: 4330 - RNA, 19 nt, Artificial Sequence
  Synthetic
uauuaacugugaagccguu

SEQ ID NO: 4331 - RNA, 19 nt, Artificial Sequence
  Synthetic
ugaaaugaauaucacuuaa

SEQ ID NO: 4332 - RNA, 19 nt, Artificial Sequence
  Synthetic
agcaacguugcuaaauuuc

SEQ ID NO: 4333 - RNA, 19 nt, Artificial Sequence
  Synthetic
cuauguguuugaaaugugu

SEQ ID NO: 4334 - RNA, 19 nt, Artificial Sequence
  Synthetic
uuaaugaaggcacugcuua

SEQ ID NO: 4335 - RNA, 19 nt, Artificial Sequence
  Synthetic
auuuguagucaccuugaac

SEQ ID NO: 4336 - RNA, 19 nt, Artificial Sequence
  Synthetic
cugacuuaaccuagaagcu

SEQ ID NO: 4337 - RNA, 19 nt, Artificial Sequence
  Synthetic
ugugccuucuugugaaaaa

SEQ ID NO: 4338 - RNA, 19 nt, Artificial Sequence
  Synthetic
aaaaaaaaaacaaaaacaa

SEQ ID NO: 4339 - RNA, 19 nt, Artificial Sequence
  Synthetic
aaaaacagccuuuaaacaa

SEQ ID NO: 4340 - RNA, 19 nt, Artificial Sequence
  Synthetic
aguuuccuuagugucaaaa

SEQ ID NO: 4341 - RNA, 19 nt, Artificial Sequence
  Synthetic
gugucugugccucucuucc

SEQ ID NO: 4342 - RNA, 19 nt, Artificial Sequence
  Synthetic
ggugcccuucuccuaucug

SEQ ID NO: 4343 - RNA, 19 nt, Artificial Sequence
  Synthetic
cugcaaguggcuccagccg

SEQ ID NO: 4344 - RNA, 19 nt, Artificial Sequence
  Synthetic
uugcaaaaacccucagucc

SEQ ID NO: 4345 - RNA, 19 nt, Artificial Sequence
  Synthetic
caggcugcuaggguuuugu

SEQ ID NO: 4346 - RNA, 19 nt, Artificial Sequence
  Synthetic
aucuggcuuagaguucuuc

SEQ ID NO: 4347 - RNA, 19 nt, Artificial Sequence
  Synthetic
cucucguccagccacccca

SEQ ID NO: 4348 - RNA, 19 nt, Artificial Sequence
  Synthetic
uugcugagccaagagcugc

SEQ ID NO: 4349 - RNA, 19 nt, Artificial Sequence
  Synthetic
gaucauacugugcauucuu

SEQ ID NO: 4350 - RNA, 19 nt, Artificial Sequence
  Synthetic
cuucacauccacugagcug

SEQ ID NO: 4351 - RNA, 19 nt, Artificial Sequence
  Synthetic
gcccacaggaacuucugac

SEQ ID NO: 4352 - RNA, 19 nt, Artificial Sequence
  Synthetic
aggugagaugggcuccagg

SEQ ID NO: 4353 - RNA, 19 nt, Artificial Sequence
  Synthetic
gucuguccuuaggucuaaa

SEQ ID NO: 4354 - RNA, 19 nt, Artificial Sequence
  Synthetic
gggcaucaucauccugagg

SEQ ID NO: 4355 - RNA, 19 nt, Artificial Sequence
  Synthetic
gacaacaggguccaccacg

SEQ ID NO: 4356 - RNA, 19 nt, Artificial Sequence
  Synthetic
cugcaauugcuucucacgg

SEQ ID NO: 4357 - RNA, 19 nt, Artificial Sequence
  Synthetic
gauaagaaguaauuccugc

SEQ ID NO: 4358 - RNA, 19 nt, Artificial Sequence
  Synthetic
gauuuguugcugcugcugg

SEQ ID NO: 4359 - RNA, 19 nt, Artificial Sequence
  Synthetic
uaucagaagcugcuucugg

SEQ ID NO: 4360 - RNA, 19 nt, Artificial Sequence
  Synthetic
cuguuucugaaacucugcu

SEQ ID NO: 4361 - RNA, 19 nt, Artificial Sequence
  Synthetic
ccgugucaaguucucaugc

SEQ ID NO: 4362 - RNA, 19 nt, Artificial Sequence
  Synthetic
aagcugagccuggugcugc

SEQ ID NO: 4363 - RNA, 19 nt, Artificial Sequence
  Synthetic
uuccuugauaugcuccuga

SEQ ID NO: 4364 - RNA, 19 nt, Artificial Sequence
  Synthetic
cuguuuuauggcuagaagu

SEQ ID NO: 4365 - RNA, 19 nt, Artificial Sequence
  Synthetic
uucuaggaguucuuguugc

SEQ ID NO: 4366 - RNA, 19 nt, Artificial Sequence
  Synthetic
cuccaguuucugcuccuuu

SEQ ID NO: 4367 - RNA, 19 nt, Artificial Sequence
  Synthetic
cuguucuugccucugcugc

SEQ ID NO: 4368 - RNA, 19 nt, Artificial Sequence
  Synthetic
gcgaugccucucuacuucc

SEQ ID NO: 4369 - RNA, 19 nt, Artificial Sequence
  Synthetic
aggaagcugcuguucucug

SEQ ID NO: 4370 - RNA, 19 nt, Artificial Sequence
  Synthetic
aucuuugccucugagagga

SEQ ID NO: 4371 - RNA, 19 nt, Artificial Sequence
  Synthetic
ugcccuuucucguccucua

SEQ ID NO: 4372 - RNA, 19 nt, Artificial Sequence
  Synthetic
uacuucuguacuugccacu

SEQ ID NO: 4373 - RNA, 19 nt, Artificial Sequence
  Synthetic
cucuugaagcuucugcuuu

SEQ ID NO: 4374 - RNA, 19 nt, Artificial Sequence
  Synthetic
ugauuuacucaguaggaac

SEQ ID NO: 4375 - RNA, 19 nt, Artificial Sequence
  Synthetic
uggagugucuuucguugcu

SEQ ID NO: 4376 - RNA, 19 nt, Artificial Sequence
  Synthetic
augauuuuuuccauuaguu

SEQ ID NO: 4377 - RNA, 19 nt, Artificial Sequence
  Synthetic
gggauggcggcucacggaa

SEQ ID NO: 4378 - RNA, 19 nt, Artificial Sequence
  Synthetic
agccguguaccagagcuug

SEQ ID NO: 4379 - RNA, 19 nt, Artificial Sequence
  Synthetic
caaugauguguggugggca

SEQ ID NO: 4380 - RNA, 19 nt, Artificial Sequence
  Synthetic
ggguggagagcuuugaucc

SEQ ID NO: 4381 - RNA, 19 nt, Artificial Sequence
  Synthetic
uggagauguuccacuaagg

SEQ ID NO: 4382 - RNA, 19 nt, Artificial Sequence
  Synthetic
uaauguguacuuguaggau

SEQ ID NO: 4383 - RNA, 19 nt, Artificial Sequence
  Synthetic
ugcaucuugugcuccuggu

SEQ ID NO: 4384 - RNA, 19 nt, Artificial Sequence
  Synthetic
aagggggaaaucauccuuu

SEQ ID NO: 4385 - RNA, 19 nt, Artificial Sequence
  Synthetic
cucagaggcaguuuuucga

SEQ ID NO: 4386 - RNA, 19 nt, Artificial Sequence
  Synthetic
ccgcaccuucaaguugggc

SEQ ID NO: 4387 - RNA, 19 nt, Artificial Sequence
  Synthetic
uuucuguuuuaaccuggac

SEQ ID NO: 4388 - RNA, 19 nt, Artificial Sequence
  Synthetic
gcuucuccucucugccacu

SEQ ID NO: 4389 - RNA, 19 nt, Artificial Sequence
  Synthetic
ccgccugaguaaggggcug

SEQ ID NO: 4390 - RNA, 19 nt, Artificial Sequence
  Synthetic
gacaacauuuccauccuuc

SEQ ID NO: 4391 - RNA, 19 nt, Artificial Sequence
  Synthetic
ucgcuucuugaaugaagug

SEQ ID NO: 4392 - RNA, 19 nt, Artificial Sequence
  Synthetic
uucugucaccucaaacauu

SEQ ID NO: 4393 - RNA, 19 nt, Artificial Sequence
  Synthetic
acugcuacugacugaggau

SEQ ID NO: 4394 - RNA, 19 nt, Artificial Sequence
  Synthetic
gggaccagagccuggagaa

SEQ ID NO: 4395 - RNA, 19 nt, Artificial Sequence
  Synthetic
cccauuguuuggugaacug

SEQ ID NO: 4396 - RNA, 19 nt, Artificial Sequence
  Synthetic
aguaacacuuccaguuggc

SEQ ID NO: 4397 - RNA, 19 nt, Artificial Sequence
  Synthetic
aaccgaagucucauuuuca

SEQ ID NO: 4398 - RNA, 19 nt, Artificial Sequence
  Synthetic
augagggguagggggcaaa

SEQ ID NO: 4399 - RNA, 19 nt, Artificial Sequence
  Synthetic
ugaaaccauuugcucggca

SEQ ID NO: 4400 - RNA, 19 nt, Artificial Sequence
  Synthetic
aauuagaaugcguugcugu

SEQ ID NO: 4401 - RNA, 19 nt, Artificial Sequence
  Synthetic
guucauggaaucuucauga

SEQ ID NO: 4402 - RNA, 19 nt, Artificial Sequence
  Synthetic
gguauaaagacuuagcagg

SEQ ID NO: 4403 - RNA, 19 nt, Artificial Sequence
  Synthetic
guugggcaaagaaggagag

SEQ ID NO: 4404 - RNA, 19 nt, Artificial Sequence
  Synthetic
gggaagccccaagguaaug

SEQ ID NO: 4405 - RNA, 19 nt, Artificial Sequence
  Synthetic
gagcugggauggcacugcg

SEQ ID NO: 4406 - RNA, 19 nt, Artificial Sequence
  Synthetic
gagugaauucgaagcauug

SEQ ID NO: 4407 - RNA, 19 nt, Artificial Sequence
  Synthetic
acacuucugcuuuucuuug

SEQ ID NO: 4408 - RNA, 19 nt, Artificial Sequence
  Synthetic
ccuaagcgucugcgucuca

SEQ ID NO: 4409 - RNA, 19 nt, Artificial Sequence
  Synthetic
aggcagaggaacaccuugc

SEQ ID NO: 4410 - RNA, 19 nt, Artificial Sequence
  Synthetic
gcugccuccauacugccca

SEQ ID NO: 4411 - RNA, 19 nt, Artificial Sequence
  Synthetic
gcuggaagaugccgggaug

SEQ ID NO: 4412 - RNA, 19 nt, Artificial Sequence
  Synthetic
uaaaguaacaugagggugg

SEQ ID NO: 4413 - RNA, 19 nt, Artificial Sequence
  Synthetic
guuggguggcuuucccucu

SEQ ID NO: 4414 - RNA, 19 nt, Artificial Sequence
  Synthetic
gagagccugguggcugcug

SEQ ID NO: 4415 - RNA, 19 nt, Artificial Sequence
  Synthetic
caauaauaaaugcugcagg

SEQ ID NO: 4416 - RNA, 19 nt, Artificial Sequence
  Synthetic
cugucgcauuuguucuuuc

SEQ ID NO: 4417 - RNA, 19 nt, Artificial Sequence
  Synthetic
agcuacaagaagcuuuugc

SEQ ID NO: 4418 - RNA, 19 nt, Artificial Sequence
  Synthetic
auguaagggaacuccacca

SEQ ID NO: 4419 - RNA, 19 nt, Artificial Sequence
  Synthetic
ugccaagggagacugagga

SEQ ID NO: 4420 - RNA, 19 nt, Artificial Sequence
  Synthetic
ugaaauucucucuuuuguu

SEQ ID NO: 4421 - RNA, 19 nt, Artificial Sequence
  Synthetic
gguaccucuaaugccaggu

SEQ ID NO: 4422 - RNA, 19 nt, Artificial Sequence
  Synthetic
gugacggggcaauuugugg

SEQ ID NO: 4423 - RNA, 19 nt, Artificial Sequence
  Synthetic
gguucgguucaggggucug

SEQ ID NO: 4424 - RNA, 19 nt, Artificial Sequence
  Synthetic
aggcaaaggugcagacugg

SEQ ID NO: 4425 - RNA, 19 nt, Artificial Sequence
  Synthetic
cugagccaacgugcucuga

SEQ ID NO: 4426 - RNA, 19 nt, Artificial Sequence
  Synthetic
uugcuguugaaugaccagc

SEQ ID NO: 4427 - RNA, 19 nt, Artificial Sequence
  Synthetic
cuccaagaauugcuggugu

SEQ ID NO: 4428 - RNA, 19 nt, Artificial Sequence
  Synthetic
cugguauugcuucugcuuc

SEQ ID NO: 4429 - RNA, 19 nt, Artificial Sequence
  Synthetic
guucauguggaucugcugc

SEQ ID NO: 4430 - RNA, 19 nt, Artificial Sequence
  Synthetic
agauuucgaaagcaguuug

SEQ ID NO: 4431 - RNA, 19 nt, Artificial Sequence
  Synthetic
uugcuucaguuguucaaua

SEQ ID NO: 4432 - RNA, 19 nt, Artificial Sequence
  Synthetic
cucaaggugacugccuggu

SEQ ID NO: 4433 - RNA, 19 nt, Artificial Sequence
  Synthetic
aagcucuuccucugcuucc

SEQ ID NO: 4434 - RNA, 19 nt, Artificial Sequence
  Synthetic
caucgccuggucccccuga

SEQ ID NO: 4435 - RNA, 19 nt, Artificial Sequence
  Synthetic
gggcgcucugucuuccugc

SEQ ID NO: 4436 - RNA, 19 nt, Artificial Sequence
  Synthetic
agugcuguugccacuagag

SEQ ID NO: 4437 - RNA, 19 nt, Artificial Sequence
  Synthetic
agcacugcugucgcuccua

SEQ ID NO: 4438 - RNA, 19 nt, Artificial Sequence
  Synthetic
cagugugucauccacacaa

SEQ ID NO: 4439 - RNA, 19 nt, Artificial Sequence
  Synthetic
cacagccccaacuuguccc

SEQ ID NO: 4440 - RNA, 19 nt, Artificial Sequence
  Synthetic
ugguuccuccuugaccuuc

SEQ ID NO: 4441 - RNA, 19 nt, Artificial Sequence
  Synthetic
aucuucaucacuguccacu

SEQ ID NO: 4442 - RNA, 19 nt, Artificial Sequence
  Synthetic
cauuuccuggaucugagca

SEQ ID NO: 4443 - RNA, 19 nt, Artificial Sequence
  Synthetic
agccugcuccccagauucc

SEQ ID NO: 4444 - RNA, 19 nt, Artificial Sequence
  Synthetic
aggcuguugcauaaaagca

SEQ ID NO: 4445 - RNA, 19 nt, Artificial Sequence
  Synthetic
gugcguggguuccaggaaa

SEQ ID NO: 4446 - RNA, 19 nt, Artificial Sequence
  Synthetic
cacagagagcgcacgugug

SEQ ID NO: 4447 - RNA, 19 nt, Artificial Sequence
  Synthetic
agccagcggagcuuggcgc

SEQ ID NO: 4448 - RNA, 19 nt, Artificial Sequence
  Synthetic
uccauccaugccaaccgca

SEQ ID NO: 4449 - RNA, 19 nt, Artificial Sequence
  Synthetic
gagacgguguuucucuaau

SEQ ID NO: 4450 - RNA, 19 nt, Artificial Sequence
  Synthetic
agagugaguccuggagacg

SEQ ID NO: 4451 - RNA, 19 nt, Artificial Sequence
  Synthetic
aacagaggcagcaggggaa

SEQ ID NO: 4452 - RNA, 19 nt, Artificial Sequence
  Synthetic
cauugcugggugagguaaa

SEQ ID NO: 4453 - RNA, 19 nt, Artificial Sequence
  Synthetic
aggcuggagggggcggucc

SEQ ID NO: 4454 - RNA, 19 nt, Artificial Sequence
  Synthetic
aauuccaguugcagagcca

SEQ ID NO: 4455 - RNA, 19 nt, Artificial Sequence
  Synthetic
caucaaggggucauaggca

SEQ ID NO: 4456 - RNA, 19 nt, Artificial Sequence
  Synthetic
aacgcacugguguuucagc

SEQ ID NO: 4457 - RNA, 19 nt, Artificial Sequence
  Synthetic
ggugguggaauugccacaa

SEQ ID NO: 4458 - RNA, 19 nt, Artificial Sequence
  Synthetic
uccagcaugcucagggugg

SEQ ID NO: 4459 - RNA, 19 nt, Artificial Sequence
  Synthetic
ccagauacucuguauucgu

SEQ ID NO: 4460 - RNA, 19 nt, Artificial Sequence
  Synthetic
aguuucuugcagucgugac

SEQ ID NO: 4461 - RNA, 19 nt, Artificial Sequence
  Synthetic
acauuuauuuagcagccca

SEQ ID NO: 4462 - RNA, 19 nt, Artificial Sequence
  Synthetic
ucgaccuugaauucgcuca

SEQ ID NO: 4463 - RNA, 19 nt, Artificial Sequence
  Synthetic
uuccuccaggcuggcuuuu

SEQ ID NO: 4464 - RNA, 19 nt, Artificial Sequence
  Synthetic
agaaugaacaagcuguauu

SEQ ID NO: 4465 - RNA, 19 nt, Artificial Sequence
  Synthetic
caacagugagugauguuca

SEQ ID NO: 4466 - RNA, 19 nt, Artificial Sequence
  Synthetic
caggggguuggugccauac

SEQ ID NO: 4467 - RNA, 19 nt, Artificial Sequence
  Synthetic
guccagcuucuguccgucc

SEQ ID NO: 4468 - RNA, 19 nt, Artificial Sequence
  Synthetic
accuaggaguauccugggg

SEQ ID NO: 4469 - RNA, 19 nt, Artificial Sequence
  Synthetic
aaacuuuugagagucauca

SEQ ID NO: 4470 - RNA, 19 nt, Artificial Sequence
  Synthetic
acaagguaaugaggaaaaa

SEQ ID NO: 4471 - RNA, 19 nt, Artificial Sequence
  Synthetic
guccaccccaaguccacca

SEQ ID NO: 4472 - RNA, 19 nt, Artificial Sequence
  Synthetic
auuccaaauggugucacug

SEQ ID NO: 4473 - RNA, 19 nt, Artificial Sequence
  Synthetic
accggacgaguguagcuca

SEQ ID NO: 4474 - RNA, 19 nt, Artificial Sequence
  Synthetic
aacagccaugcgugcagca

SEQ ID NO: 4475 - RNA, 19 nt, Artificial Sequence
  Synthetic
cagcucgaugacacagcca

SEQ ID NO: 4476 - RNA, 19 nt, Artificial Sequence
  Synthetic
ugaggccacuuuggaagcc

SEQ ID NO: 4477 - RNA, 19 nt, Artificial Sequence
  Synthetic
cccauucuucagcucuccu

SEQ ID NO: 4478 - RNA, 19 nt, Artificial Sequence
  Synthetic
gggccucacaacagcaaac

SEQ ID NO: 4479 - RNA, 19 nt, Artificial Sequence
  Synthetic
uucagcgugauggccaggg

SEQ ID NO: 4480 - RNA, 19 nt, Artificial Sequence
  Synthetic
ccccauggcuguggauucu

SEQ ID NO: 4481 - RNA, 19 nt, Artificial Sequence
  Synthetic
ugaauuaaaaaagcagaac

SEQ ID NO: 4482 - RNA, 19 nt, Artificial Sequence
  Synthetic
uuuggcgguaauugcaacu

SEQ ID NO: 4483 - RNA, 19 nt, Artificial Sequence
  Synthetic
uaguuggucucucaaguau

SEQ ID NO: 4484 - RNA, 19 nt, Artificial Sequence
  Synthetic
caauaucuugcuuauauuu

SEQ ID NO: 4485 - RNA, 19 nt, Artificial Sequence
  Synthetic
aacauccagaucuacaauc

SEQ ID NO: 4486 - RNA, 19 nt, Artificial Sequence
  Synthetic
gguaccguuuccaugguga

SEQ ID NO: 4487 - RNA, 19 nt, Artificial Sequence
  Synthetic
agcauaaaaggccugcugg

SEQ ID NO: 4488 - RNA, 19 nt, Artificial Sequence
  Synthetic
guacaggaugcugggguca

SEQ ID NO: 4489 - RNA, 19 nt, Artificial Sequence
  Synthetic
auagcgauggagugaaaug

SEQ ID NO: 4490 - RNA, 19 nt, Artificial Sequence
  Synthetic
gaaaaaguucccuucauca

SEQ ID NO: 4491 - RNA, 19 nt, Artificial Sequence
  Synthetic
uggggcuccacugccaggg

SEQ ID NO: 4492 - RNA, 19 nt, Artificial Sequence
  Synthetic
gccuguuccaaccucauuu

SEQ ID NO: 4493 - RNA, 19 nt, Artificial Sequence
  Synthetic
auuguacccuucuccaagg

SEQ ID NO: 4494 - RNA, 19 nt, Artificial Sequence
  Synthetic
uguccaggcaauauuuaua

SEQ ID NO: 4495 - RNA, 19 nt, Artificial Sequence
  Synthetic
gggaggaucaaggccaccu

SEQ ID NO: 4496 - RNA, 19 nt, Artificial Sequence
  Synthetic
guacucaacaucucccaug

SEQ ID NO: 4497 - RNA, 19 nt, Artificial Sequence
  Synthetic
gguccugaaugcuucaagg

SEQ ID NO: 4498 - RNA, 19 nt, Artificial Sequence
  Synthetic
ggccacaggcuucacgaug

SEQ ID NO: 4499 - RNA, 19 nt, Artificial Sequence
  Synthetic
gucuggaucaaacucuuug

SEQ ID NO: 4500 - RNA, 19 nt, Artificial Sequence
  Synthetic
agcagauacuaagaccaug

SEQ ID NO: 4501 - RNA, 19 nt, Artificial Sequence
  Synthetic
uuccaaugcaucaaaucca

SEQ ID NO: 4502 - RNA, 19 nt, Artificial Sequence
  Synthetic
uagaggagggguguggccu

SEQ ID NO: 4503 - RNA, 19 nt, Artificial Sequence
  Synthetic
cgucacuuuguacccuccu

SEQ ID NO: 4504 - RNA, 19 nt, Artificial Sequence
  Synthetic
augaccaaaacauuuugcc

SEQ ID NO: 4505 - RNA, 19 nt, Artificial Sequence
  Synthetic
caucaauugcuucgucaaa

SEQ ID NO: 4506 - RNA, 19 nt, Artificial Sequence
  Synthetic
acguccaucagccaauguc

SEQ ID NO: 4507 - RNA, 19 nt, Artificial Sequence
  Synthetic
uucuagagccaacaccaca

SEQ ID NO: 4508 - RNA, 19 nt, Artificial Sequence
  Synthetic
ugugagaucauguccuccu

SEQ ID NO: 4509 - RNA, 19 nt, Artificial Sequence
  Synthetic
ugaugcaucacagauggcu

SEQ ID NO: 4510 - RNA, 19 nt, Artificial Sequence
  Synthetic
ggcauuuacacaggcuucu

SEQ ID NO: 4511 - RNA, 19 nt, Artificial Sequence
  Synthetic
cagcucauuuccuagaagg

SEQ ID NO: 4512 - RNA, 19 nt, Artificial Sequence
  Synthetic
aucuucugcaaguggcucc

SEQ ID NO: 4513 - RNA, 19 nt, Artificial Sequence
  Synthetic
cgggcuuugguggagaaua

SEQ ID NO: 4514 - RNA, 19 nt, Artificial Sequence
  Synthetic
aauaacagcauucauauuc

SEQ ID NO: 4515 - RNA, 19 nt, Artificial Sequence
  Synthetic
aaugaucuucuguaaagaa

SEQ ID NO: 4516 - RNA, 19 nt, Artificial Sequence
  Synthetic
auacuugcuuugaauuuca

SEQ ID NO: 4517 - RNA, 19 nt, Artificial Sequence
  Synthetic
cauccuuacugacuuccaa

SEQ ID NO: 4518 - RNA, 19 nt, Artificial Sequence
  Synthetic
gccccuuggcacagccacc

SEQ ID NO: 4519 - RNA, 19 nt, Artificial Sequence
  Synthetic
agcaccagccagagcacag

SEQ ID NO: 4520 - RNA, 19 nt, Artificial Sequence
  Synthetic
ugucuccucuugcaacuga

SEQ ID NO: 4521 - RNA, 19 nt, Artificial Sequence
  Synthetic
cagggcagaaacggucucu

SEQ ID NO: 4522 - RNA, 19 nt, Artificial Sequence
  Synthetic
auccacuguuagggaggcc

SEQ ID NO: 4523 - RNA, 19 nt, Artificial Sequence
  Synthetic
agcaaagggcuguuccaca

SEQ ID NO: 4524 - RNA, 19 nt, Artificial Sequence
  Synthetic
aguucugcugucuuccuga

SEQ ID NO: 4525 - RNA, 19 nt, Artificial Sequence
  Synthetic
uuccauaggcucaccagca

SEQ ID NO: 4526 - RNA, 19 nt, Artificial Sequence
  Synthetic
ucacaaggcuggcuccucu

SEQ ID NO: 4527 - RNA, 19 nt, Artificial Sequence
  Synthetic
agagggggacuuggcacuu

SEQ ID NO: 4528 - RNA, 19 nt, Artificial Sequence
  Synthetic
ucacacacaggaaauauca

SEQ ID NO: 4529 - RNA, 19 nt, Artificial Sequence
  Synthetic
gggggauacacaaugaugu

SEQ ID NO: 4530 - RNA, 19 nt, Artificial Sequence
  Synthetic
ucugaggguacuggggugg

SEQ ID NO: 4531 - RNA, 19 nt, Artificial Sequence
  Synthetic
ggcagcagacaagacaugu

SEQ ID NO: 4532 - RNA, 19 nt, Artificial Sequence
  Synthetic
uugaaucugugccacccag

SEQ ID NO: 4533 - RNA, 19 nt, Artificial Sequence
  Synthetic
cccaguguuuauguuccau

SEQ ID NO: 4534 - RNA, 19 nt, Artificial Sequence
  Synthetic
gcuguucagaauuuugugc

SEQ ID NO: 4535 - RNA, 19 nt, Artificial Sequence
  Synthetic
caaagaacaagugaagcug

SEQ ID NO: 4536 - RNA, 19 nt, Artificial Sequence
  Synthetic
ugcccuuucaaguccaucc

SEQ ID NO: 4537 - RNA, 19 nt, Artificial Sequence
  Synthetic
cguuuaaggaaucuuuaau

SEQ ID NO: 4538 - RNA, 19 nt, Artificial Sequence
  Synthetic
cuagaaucacagcgguuac

SEQ ID NO: 4539 - RNA, 19 nt, Artificial Sequence
  Synthetic
ucgugguuuacuguaacuc

SEQ ID NO: 4540 - RNA, 19 nt, Artificial Sequence
  Synthetic
ggaagcaguuucuuccaau

SEQ ID NO: 4541 - RNA, 19 nt, Artificial Sequence
  Synthetic
gcauauuaaaagcaugcug

SEQ ID NO: 4542 - RNA, 19 nt, Artificial Sequence
  Synthetic
cuaggagugggucacccag

SEQ ID NO: 4543 - RNA, 19 nt, Artificial Sequence
  Synthetic
cuaguucaaacuugguguc

SEQ ID NO: 4544 - RNA, 19 nt, Artificial Sequence
  Synthetic
gugcuguacugaauguuuc

SEQ ID NO: 4545 - RNA, 19 nt, Artificial Sequence
  Synthetic
ugaaauuaacaauaucuag

SEQ ID NO: 4546 - RNA, 19 nt, Artificial Sequence
  Synthetic
acuggcugucauagcuucu

SEQ ID NO: 4547 - RNA, 19 nt, Artificial Sequence
  Synthetic
gguuuugcccaaaauuuca

SEQ ID NO: 4548 - RNA, 19 nt, Artificial Sequence
  Synthetic
aggaaugacuaugucucag

SEQ ID NO: 4549 - RNA, 19 nt, Artificial Sequence
  Synthetic
aaagcugaucagaauguca

SEQ ID NO: 4550 - RNA, 19 nt, Artificial Sequence
  Synthetic
aaacaaauuaccccaaaaa

SEQ ID NO: 4551 - RNA, 19 nt, Artificial Sequence
  Synthetic
aaguuaagacuguuugaaa

SEQ ID NO: 4552 - RNA, 19 nt, Artificial Sequence
  Synthetic
aaagcaaaucuuguaaaca

SEQ ID NO: 4553 - RNA, 19 nt, Artificial Sequence
  Synthetic
acgauccguucauagcuaa

SEQ ID NO: 4554 - RNA, 19 nt, Artificial Sequence
  Synthetic
uacauucuggguggaauua

SEQ ID NO: 4555 - RNA, 19 nt, Artificial Sequence
  Synthetic
caaacaaacaagaaacauu

SEQ ID NO: 4556 - RNA, 19 nt, Artificial Sequence
  Synthetic
aacccuaacaaaacaaaac

SEQ ID NO: 4557 - RNA, 19 nt, Artificial Sequence
  Synthetic
uguuaaaguugagaaaaaa

SEQ ID NO: 4558 - RNA, 19 nt, Artificial Sequence
  Synthetic
aggaacaguugaacugugu

SEQ ID NO: 4559 - RNA, 19 nt, Artificial Sequence
  Synthetic
ccaucuugaacuuuuacua

SEQ ID NO: 4560 - RNA, 19 nt, Artificial Sequence
  Synthetic
agccucaugcuaguuccuc

SEQ ID NO: 4561 - RNA, 19 nt, Artificial Sequence
  Synthetic
cuucgagauacugaaaaaa

SEQ ID NO: 4562 - RNA, 19 nt, Artificial Sequence
  Synthetic
guuccuuuggcauuuggac

SEQ ID NO: 4563 - RNA, 19 nt, Artificial Sequence
  Synthetic
uuacaaacagugugugagg

SEQ ID NO: 4564 - RNA, 19 nt, Artificial Sequence
  Synthetic
auauaaaauauugcaccau

SEQ ID NO: 4565 - RNA, 19 nt, Artificial Sequence
  Synthetic
gauguuuaaaaaaaaguga

SEQ ID NO: 4566 - RNA, 19 nt, Artificial Sequence
  Synthetic
gaacacaaagauguugggg

SEQ ID NO: 4567 - RNA, 19 nt, Artificial Sequence
  Synthetic
caaauugccugugugugag

SEQ ID NO: 4568 - RNA, 19 nt, Artificial Sequence
  Synthetic
aacacaauugcaacauugc

SEQ ID NO: 4569 - RNA, 19 nt, Artificial Sequence
  Synthetic
ggggggacuucauucucca

SEQ ID NO: 4570 - RNA, 19 nt, Artificial Sequence
  Synthetic
uguguguggcugggaggug

SEQ ID NO: 4571 - RNA, 19 nt, Artificial Sequence
  Synthetic
ucaugagaacaaaggaugu

SEQ ID NO: 4572 - RNA, 19 nt, Artificial Sequence
  Synthetic
auuugcucagaccuacugu

SEQ ID NO: 4573 - RNA, 19 nt, Artificial Sequence
  Synthetic
gaaaaugcuugguggaaca

SEQ ID NO: 4574 - RNA, 19 nt, Artificial Sequence
  Synthetic
gugcuuuucaaagacacug

SEQ ID NO: 4575 - RNA, 19 nt, Artificial Sequence
  Synthetic
ccaccuuugaaaaguuacg

SEQ ID NO: 4576 - RNA, 19 nt, Artificial Sequence
  Synthetic
auaugcaacaaauuaagac

SEQ ID NO: 4577 - RNA, 19 nt, Artificial Sequence
  Synthetic
ugaauaaguccuugauaga

SEQ ID NO: 4578 - RNA, 19 nt, Artificial Sequence
  Synthetic
cagaaaaggaaaggugagu

SEQ ID NO: 4579 - RNA, 19 nt, Artificial Sequence
  Synthetic
aaaucaauugauagagggc

SEQ ID NO: 4580 - RNA, 19 nt, Artificial Sequence
  Synthetic
augaugaaagguaagaaga

SEQ ID NO: 4581 - RNA, 19 nt, Artificial Sequence
  Synthetic
uucuaaaggaaggaaugaa

SEQ ID NO: 4582 - RNA, 19 nt, Artificial Sequence
  Synthetic
auggguaaucuucaguuuu

SEQ ID NO: 4583 - RNA, 19 nt, Artificial Sequence
  Synthetic
aaguaauaagaggagauua

SEQ ID NO: 4584 - RNA, 19 nt, Artificial Sequence
  Synthetic
uaaauagucaaggcccuca

SEQ ID NO: 4585 - RNA, 19 nt, Artificial Sequence
  Synthetic
aaaguaaacaaaauaaacu

SEQ ID NO: 4586 - RNA, 19 nt, Artificial Sequence
  Synthetic
acaacuguguuaaccugua

SEQ ID NO: 4587 - RNA, 19 nt, Artificial Sequence
  Synthetic
aaaaugcaaucagacaaaa

SEQ ID NO: 4588 - RNA, 19 nt, Artificial Sequence
  Synthetic
aacggcuucacaguuaaua

SEQ ID NO: 4589 - RNA, 19 nt, Artificial Sequence
  Synthetic
uuaagugauauucauuuca

SEQ ID NO: 4590 - RNA, 19 nt, Artificial Sequence
  Synthetic
gaaauuuagcaacguugcu

SEQ ID NO: 4591 - RNA, 19 nt, Artificial Sequence
  Synthetic
acacauuucaaacacauag

SEQ ID NO: 4592 - RNA, 19 nt, Artificial Sequence
  Synthetic
uaagcagugccuucauuaa

SEQ ID NO: 4593 - RNA, 19 nt, Artificial Sequence
  Synthetic
guucaaggugacuacaaau

SEQ ID NO: 4594 - RNA, 19 nt, Artificial Sequence
  Synthetic
agcuucuagguuaagucag

SEQ ID NO: 4595 - RNA, 19 nt, Artificial Sequence
  Synthetic
uuuuucacaagaaggcaca

SEQ ID NO: 4596 - RNA, 19 nt, Artificial Sequence
  Synthetic
uuguuuuuguuuuuuuuuu

SEQ ID NO: 4597 - RNA, 19 nt, Artificial Sequence
  Synthetic
uuguuuaaaggcuguuuuu

SEQ ID NO: 4598 - RNA, 19 nt, Artificial Sequence
  Synthetic
uuuugacacuaaggaaacu

SEQ ID NO: 4599 - RNA, 23 nt, Artificial Sequence
  Synthetic
caccaaagcccgaauaugaaugc

SEQ ID NO: 4600 - RNA, 23 nt, Artificial Sequence
  Synthetic
aacguaaccgcugugauucuaga

SEQ ID NO: 4601 - RNA, 23 nt, Artificial Sequence
  Synthetic
uacaguaaaccacgauuggaaga

SEQ ID NO: 4602 - RNA, 23 nt, Artificial Sequence
  Synthetic
uagcuaugaacggaucguaauuc

SEQ ID NO: 4603 - RNA, 23 nt, Artificial Sequence
  Synthetic
aacaaugggccaacuggaagugu

SEQ ID NO: 4604 - RNA, 23 nt, Artificial Sequence
  Synthetic
cccaggauacuccuaggugauga

SEQ ID NO: 4605 - RNA, 23 nt, Artificial Sequence
  Synthetic
caggauacuccuaggugaugacu

SEQ ID NO: 4606 - RNA, 23 nt, Artificial Sequence
  Synthetic
agcccgaauaugaaugcuguuau

SEQ ID NO: 4607 - DNA, 21 bp, Artificial Sequence
  Synthetic
ccaaagcccgaauaugaautt

SEQ ID NO: 4608 - DNA, 21 bp, Artificial Sequence
  Synthetic
cguaaccgcugugauucuatt

SEQ ID NO: 4609 - DNA, 21 bp, Artificial Sequence
  Synthetic
caguaaaccacgauuggaatt

SEQ ID NO: 4610 - DNA, 21 bp, Artificial Sequence
  Synthetic
gcuaugaacggaucguaautt

SEQ ID NO: 4611 - DNA, 21 bp, Artificial Sequence
  Synthetic
caaugggccaacuggaagutt

SEQ ID NO: 4612 - DNA, 21 bp, Artificial Sequence
  Synthetic
caggauacuccuaggugautt

SEQ ID NO: 4613 - DNA, 21 bp, Artificial Sequence
  Synthetic
ggauacuccuaggugaugatt

SEQ ID NO: 4614 - DNA, 21 bp, Artificial Sequence
  Synthetic
cccgaauaugaaugcuguutt

SEQ ID NO: 4615 - DNA, 21 bp, Artificial Sequence
  Synthetic
auucauauucgggcuuuggtt

SEQ ID NO: 4616 - DNA, 21 bp, Artificial Sequence
  Synthetic
uagaaucacagcgguuacgtt

SEQ ID NO: 4617 - DNA, 21 bp, Artificial Sequence
  Synthetic
uuccaaucgugguuuacugtt

SEQ ID NO: 4618 - DNA, 21 bp, Artificial Sequence
  Synthetic
auuacgauccguucauagctt

SEQ ID NO: 4619 - DNA, 21 bp, Artificial Sequence
  Synthetic
acuuccaguuggcccauugtt

SEQ ID NO: 4620 - DNA, 21 bp, Artificial Sequence
  Synthetic
aucaccuaggaguauccugtt

SEQ ID NO: 4621 - DNA, 21 bp, Artificial Sequence
  Synthetic
ucaucaccuaggaguaucctt

SEQ ID NO: 4622 - DNA, 21 bp, Artificial Sequence
  Synthetic
aacagcauucauauucgggtt

SEQ ID NO: 4623 - DNA, 21 bp, Artificial Sequence
  Synthetic
  misc_feature (1)..(1): 5'-3 attached inverted deoxyabasic moiety.
  misc_feature (1)..(2): 2'-deoxy-2'-fluoro
  misc_feature (7)..(9): 2'-deoxy-2'-fluoro
  misc_feature (13)..(13): 2'-deoxy-2'-fluoro
  misc_feature (15)..(15): 2'-deoxy-2'-fluoro
  misc_feature (19)..(19): 2'-deoxy-2'-fluoro
  misc_feature (21)..(21): 3'-3 attached inverted deoxyabasic moiety.
ccaaagcccgaauaugaautt

SEQ ID NO: 4624 - DNA, 21 bp, Artificial Sequence
  Synthetic
  misc_feature (1)..(1): 5'-3 attached inverted deoxyabasic moiety.
  misc_feature (1)..(1): 2'-deoxy-2'-fluoro
  misc_feature (3)..(3): 2'-deoxy-2'-fluoro
  misc_feature (6)..(7): 2'-deoxy-2'-fluoro
  misc_feature (9)..(10): 2'-deoxy-2'-fluoro
  misc_feature (12)..(12): 2'-deoxy-2'-fluoro
  misc_feature (15)..(18): 2'-deoxy-2'-fluoro
  misc_feature (21)..(21): 3'-3 attached inverted deoxyabasic moiety.
cguaaccgcugugauucuatt

SEQ ID NO: 4625 - DNA, 21 bp, Artificial Sequence
  Synthetic
  misc_feature (1)..(1): 2'-deoxy-2'-fluoro
  misc_feature (1)..(1): 5'-3 attached inverted deoxyabasic moiety.
  misc_feature (4)..(4): 2'-deoxy-2'-fluoro
  misc_feature (8)..(9): 2'-deoxy-2'-fluoro
  misc_feature (11)..(11): 2'-deoxy-2'-fluoro
  misc_feature (14)..(15): 2'-deoxy-2'-fluoro
  misc_feature (21)..(21): 3'-3 attached inverted deoxyabasic moiety.
caguaaaccacgauuggaatt

SEQ ID NO: 4626 - DNA, 21 bp, Artificial Sequence
  Synthetic
  misc_feature (1)..(1): 5'-3 attached inverted deoxyabasic moiety.
  misc_feature (2)..(3): 2'-deoxy-2'-fluoro
  misc_feature (5)..(5): 2'-deoxy-2'-fluoro
  misc_feature (9)..(9): 2'-deoxy-2'-fluoro
  misc_feature (13)..(14): 2'-deoxy-2'-fluoro
  misc_feature (16)..(16): 2'-deoxy-2'-fluoro
  misc_feature (19)..(19): 2'-deoxy-2'-fluoro
  misc_feature (21)..(21): 3'-3 attached inverted deoxyabasic moiety.
gcuaugaacggaucguaautt

SEQ ID NO: 4627 - DNA, 21 bp, Artificial Sequence
  Synthetic
  misc_feature (1)..(1): 5'-3 attached inverted deoxyabasic moiety.
  misc_feature (1)..(1): 2'-deoxy-2'-fluoro
  misc_feature (4)..(4): 2'-deoxy-2'-fluoro
  misc_feature (8)..(9): 2'-deoxy-2'-fluoro
  misc_feature (12)..(13): 2'-deoxy-2'-fluoro
  misc_feature (19)..(19): 2'-deoxy-2'-fluoro
  misc_feature (21)..(21): 3'-3 attached inverted deoxyabasic moiety.
caaugggccaacuggaagutt

SEQ ID NO: 4628 - DNA, 21 bp, Artificial Sequence
  Synthetic
  misc_feature (1)..(1): 5'-3 attached inverted deoxyabasic moiety.
  misc_feature (1)..(1): 2'-deoxy-2'-fluoro
  misc_feature (6)..(6): 2'-deoxy-2'-fluoro
  misc_feature (8)..(12): 2'-deoxy-2'-fluoro
  misc_feature (16)..(16): 2'-deoxy-2'-fluoro
  misc_feature (19)..(19): 2'-deoxy-2'-fluoro
  misc_feature (21)..(21): 3'-3 attached inverted deoxyabasic moiety.
caggauacuccuaggugautt

SEQ ID NO: 4629 - DNA, 21 bp, Artificial Sequence
  Synthetic
  misc_feature (1)..(1): 5'-3 attached inverted deoxyabasic moiety.
  misc_feature (4)..(4): 2'-deoxy-2'-fluoro
  misc_feature (6)..(10): 2'-deoxy-2'-fluoro
  misc_feature (14)..(14): 2'-deoxy-2'-fluoro
  misc_feature (17)..(17): 2'-deoxy-2'-fluoro
  misc_feature (21)..(21): 3'-3 attached inverted deoxyabasic moiety.
ggauacuccuaggugaugatt

SEQ ID NO: 4630 - DNA, 21 bp, Artificial Sequence
  Synthetic
  misc_feature (1)..(1): 5'-3 attached inverted deoxyabasic moiety.
  misc_feature (1)..(3): 2'-deoxy-2'-fluoro
  misc_feature (7)..(7): 2'-deoxy-2'-fluoro
  misc_feature (9)..(9): 2'-deoxy-2'-fluoro
  misc_feature (13)..(13): 2'-deoxy-2'-fluoro
  misc_feature (15)..(16): 2'-deoxy-2'-fluoro
  misc_feature (18)..(19): 2'-deoxy-2'-fluoro
  misc_feature (21)..(21): 3'-3 attached inverted deoxyabasic moiety.
cccgaauaugaaugcuguutt

SEQ ID NO: 4631 - DNA, 21 bp, Artificial Sequence
  Synthetic
  misc_feature (2)..(4): 2'-deoxy-2'-fluoro
  misc_feature (6)..(6): 2'-deoxy-2'-fluoro
  misc_feature (8)..(10): 2'-deoxy-2'-fluoro
  misc_feature (14)..(17): 2'-deoxy-2'-fluoro
  misc_feature (20)..(21): phosphorothioate linkage
auucauauucgggcuuuggtt

SEQ ID NO: 4632 - DNA, 21 bp, Artificial Sequence
  Synthetic
  misc_feature (1)..(1): 2'-deoxy-2'-fluoro
  misc_feature (6)..(7): 2'-deoxy-2'-fluoro
  misc_feature (9)..(9): 2'-deoxy-2'-fluoro
  misc_feature (12)..(12): 2'-deoxy-2'-fluoro
  misc_feature (15)..(16): 2'-deoxy-2'-fluoro
  misc_feature (18)..(18): 2'-deoxy-2'-fluoro
  misc_feature (20)..(21): phosphorothioate linkage
uagaaucacagcgguuacgtt

SEQ ID NO: 4633 - DNA, 21 bp, Artificial Sequence
  Synthetic
  misc_feature (1)..(4): 2'-deoxy-2'-fluoro
  misc_feature (7)..(8): 2'-deoxy-2'-fluoro
  misc_feature (10)..(10): 2'-deoxy-2'-fluoro
  misc_feature (13)..(15): 2'-deoxy-2'-fluoro
  misc_feature (17)..(18): 2'-deoxy-2'-fluoro
  misc_feature (20)..(21): phosphorothioate linkage
uuccaaucgugguuuacugtt

SEQ ID NO: 4634 - DNA, 21 bp, Artificial Sequence
  Synthetic
  misc_feature (2)..(3): 2'-deoxy-2'-fluoro
  misc_feature (5)..(5): 2'-deoxy-2'-fluoro
  misc_feature (8)..(10): 2'-deoxy-2'-fluoro
  misc_feature (12)..(14): 2'-deoxy-2'-fluoro
  misc_feature (16)..(16): 2'-deoxy-2'-fluoro
  misc_feature (19)..(19): 2'-deoxy-2'-fluoro
  misc_feature (20)..(21): phosphorothioate linkage
auuacgauccguucauagctt

SEQ ID NO: 4635 - DNA, 21 bp, Artificial Sequence
  Synthetic
  misc_feature (2)..(6): 2'-deoxy-2'-fluoro
  misc_feature (9)..(10): 2'-deoxy-2'-fluoro
  misc_feature (13)..(15): 2'-deoxy-2'-fluoro
  misc_feature (17)..(18): 2'-deoxy-2'-fluoro
  misc_feature (20)..(21): phosphorothioate linkage
acuuccaguuggcccauugtt

SEQ ID NO: 4636 - DNA, 21 bp, Artificial Sequence
  Synthetic
  misc_feature (2)..(3): 2'-deoxy-2'-fluoro
  misc_feature (5)..(7): 2'-deoxy-2'-fluoro
  misc_feature (13)..(13): 2'-deoxy-2'-fluoro
  misc_feature (15)..(18): 2'-deoxy-2'-fluoro
  misc_feature (20)..(21): phosphorothioate linkage
aucaccuaggaguauccugtt

SEQ ID NO: 4637 - DNA, 21 bp, Artificial Sequence
  Synthetic
  misc_feature (1)..(2): 2'-deoxy-2'-fluoro
  misc_feature (4)..(5): 2'-deoxy-2'-fluoro
  misc_feature (7)..(9): 2'-deoxy-2'-fluoro
  misc_feature (15)..(15): 2'-deoxy-2'-fluoro
  misc_feature (17)..(19): 2'-deoxy-2'-fluoro
  misc_feature (20)..(21): phosphorothioate linkage
ucaucaccuaggaguaucctt

SEQ ID NO: 4638 - DNA, 21 bp, Artificial Sequence
  Synthetic
  misc_feature (3)..(3): 2'-deoxy-2'-fluoro
  misc_feature (6)..(6): 2'-deoxy-2'-fluoro
  misc_feature (8)..(10): 2'-deoxy-2'-fluoro
  misc_feature (12)..(12): 2'-deoxy-2'-fluoro
  misc_feature (14)..(16): 2'-deoxy-2'-fluoro
  misc_feature (20)..(21): phosphorothioate linkage
aacagcauucauauucgggtt

SEQ ID NO: 4639 - DNA, 21 bp, Artificial Sequence
  Synthetic
  misc_feature (1)..(1): 5'-3 attached inverted deoxyabasic moiety.
  misc_feature (1)..(2): 2'-deoxy-2'-fluoro
  misc_feature (3)..(5): deoxy Adenosine
  misc_feature (6)..(6): deoxy Guanosine
  misc_feature (7)..(9): 2'-deoxy-2'-fluoro
  misc_feature (10)..(10): deoxy Guanosine
  misc_feature (11)..(12): deoxy Adenosine
  misc_feature (13)..(13): 2'-deoxy-2'-fluoro
  misc_feature (14)..(14): deoxy Adenosine
  misc_feature (15)..(15): 2'-deoxy-2'-fluoro
  misc_feature (16)..(16): deoxy Guanosine
  misc_feature (17)..(18): deoxy Adenosine
  misc_feature (19)..(19): 2'-deoxy-2'-fluoro
  misc_feature (21)..(21): 3'-3 attached inverted deoxyabasic moiety.
ccaaagcccgaauaugaautt

SEQ ID NO: 4640 - DNA, 21 bp, Artificial Sequence
  Synthetic
  misc_feature (1)..(1): 5'-3 attached inverted deoxyabasic moiety.
  misc_feature (1)..(1): 2'-deoxy-2'-fluoro
  misc_feature (2)..(2): dexoy Guanosine
  misc_feature (3)..(3): 2'-deoxy-2'-fluoro
  misc_feature (4)..(5): deoxy Adenosine
  misc_feature (6)..(7): 2'-deoxy-2'-fluoro
  misc_feature (8)..(8): deoxy Guanosine
  misc_feature (9)..(10): 2'-deoxy-2'-fluoro
  misc_feature (11)..(11): deoxy Guanosine
  misc_feature (12)..(12): 2'-deoxy-2'-fluoro
  misc_feature (13)..(13): deoxy Guanosine
  misc_feature (14)..(14): deoxy Adenosine
  misc_feature (15)..(18): 2'-deoxy-2'-fluoro
  misc_feature (19)..(19): deoxy Adenosine
  misc_feature (21)..(21): 3'-3 attached inverted deoxyabasic moiety.
cguaaccgcugugauucuatt

SEQ ID NO: 4641 - DNA, 21 bp, Artificial Sequence
  Synthetic
  misc_feature (1)..(1): 5'-3 attached inverted deoxyabasic moiety.
  misc_feature (1)..(1): 2'-deoxy-2'-fluoro
  misc_feature (2)..(2): deoxy Adenosine
  misc_feature (3)..(3): deoxy Guanosine
  misc_feature (4)..(4): 2'-deoxy-2'-fluoro
  misc_feature (5)..(7): deoxy Adenosine
  misc_feature (8)..(9): 2'-deoxy-2'-fluoro
  misc_feature (10)..(10): deoxy Adenosine
  misc_feature (11)..(11): 2'-deoxy-2'-fluoro
  misc_feature (12)..(12): deoxy Guanosine
  misc_feature (13)..(13): deoxy Adenosine
  misc_feature (14)..(15): 2'-deoxy-2'-fluoro
  misc_feature (16)..(17): deoxy Guanosine
  misc_feature (18)..(19): deoxy Adenosine
  misc_feature (21)..(21): 3'-3 attached inverted deoxyabasic moiety.
caguaaaccacgauuggaatt

SEQ ID NO: 4642 - DNA, 21 bp, Artificial Sequence
  Synthetic
  misc_feature (1)..(1): 5'-3 attached inverted deoxyabasic moiety.
  misc_feature (1)..(1): deoxy Guanosine
  misc_feature (2)..(3): 2'-deoxy-2'-fluoro
  misc_feature (4)..(4): deoxy Adenosine
  misc_feature (5)..(5): 2'-deoxy-2'-fluoro
  misc_feature (6)..(6): deoxy Guanosine
  misc_feature (7)..(8): deoxy Adenosine
  misc_feature (9)..(9): 2'-deoxy-2'-fluoro
  misc_feature (10)..(11): deoxy Guanosine
  misc_feature (12)..(12): deoxy Adenosine
  misc_feature (13)..(14): 2'-deoxy-2'-fluoro
  misc_feature (15)..(15): deoxy Guanosine
  misc_feature (16)..(16): 2'-deoxy-2'-fluoro
  misc_feature (17)..(18): deoxy Adenosine
  misc_feature (19)..(19): 2'-deoxy-2'-fluoro
  misc_feature (21)..(21): 3'-3 attached inverted deoxyabasic moiety.
gcuaugaacggaucguaautt

SEQ ID NO: 4643 - DNA, 21 bp, Artificial Sequence
  Synthetic
  misc_feature (1)..(1): 5'-3 attached inverted deoxyabasic moiety.
  misc_feature (1)..(1): 2'-deoxy-2'-fluoro
  misc_feature (2)..(3): deoxy Adenosine
  misc_feature (4)..(4): 2'-deoxy-2'-fluoro
  misc_feature (5)..(7): deoxy Guanosine
  misc_feature (8)..(9): 2'-deoxy-2'-fluoro
  misc_feature (10)..(11): deoxy Adenosine
  misc_feature (12)..(13): 2'-deoxy-2'-fluoro
  misc_feature (14)..(15): deoxy Guanosine
  misc_feature (16)..(17): deoxy Adenosine
  misc_feature (18)..(18): deoxy Guanosine
  misc_feature (19)..(19): 2'-deoxy-2'-fluoro
  misc_feature (21)..(21): 3'-3 attached inverted deoxyabasic moiety.
caaugggccaacuggaagutt

SEQ ID NO: 4644 - DNA, 21 bp, Artificial Sequence
  Synthetic
  misc_feature (1)..(1): 5'-3 attached inverted deoxyabasic moiety.
  misc_feature (1)..(1): 2'-deoxy-2'-fluoro
  misc_feature (2)..(2): deoxy Adenosine
  misc_feature (3)..(4): deoxy Guanosine
  misc_feature (5)..(5): deoxy Adenosine
  misc_feature (6)..(6): 2'-deoxy-2'-fluoro
  misc_feature (7)..(7): deoxy Adenosine
  misc_feature (8)..(12): 2'-deoxy-2'-fluoro
  misc_feature (13)..(13): deoxy Adenosine
  misc_feature (14)..(15): deoxy Guanosine
  misc_feature (16)..(16): 2'-deoxy-2'-fluoro
  misc_feature (17)..(17): deoxy Guanosine
  misc_feature (18)..(18): deoxy Adenosine
  misc_feature (19)..(19): 2'-deoxy-2'-fluoro
  misc_feature (21)..(21): 3'-3 attached inverted deoxyabasic moiety.
caggauacuccuaggugautt

SEQ ID NO: 4645 - DNA, 21 bp, Artificial Sequence
  Synthetic
  misc_feature (1)..(1): 5'-3 attached inverted deoxyabasic moiety.
  misc_feature (1)..(2): deoxy Guanosine
  misc_feature (3)..(3): deoxy Adenosine
  misc_feature (4)..(4): 2'-deoxy-2'-fluoro
  misc_feature (5)..(5): deoxy Adenosine
  misc_feature (6)..(10): 2'-deoxy-2'-fluoro
  misc_feature (11)..(11): deoxy Adenosine
  misc_feature (12)..(13): deoxy Guanosine
  misc_feature (14)..(14): 2'-deoxy-2'-fluoro
  misc_feature (15)..(15): deoxy Guanosine
  misc_feature (16)..(16): deoxy Adenosine
  misc_feature (17)..(17): 2'-deoxy-2'-fluoro
  misc_feature (18)..(18): deoxy Guanosine
  misc_feature (19)..(19): deoxy Adenosine
  misc_feature (21)..(21): 3'-3 attached inverted deoxyabasic moiety.
ggauacuccuaggugaugatt

SEQ ID NO: 4646 - DNA, 21 bp, Artificial Sequence
  Synthetic
  misc_feature (1)..(1): 5'-3 attached inverted deoxyabasic moiety.
  misc_feature (1)..(3): 2'-deoxy-2'-fluoro
  misc_feature (4)..(4): deoxy Guanosine
  misc_feature (5)..(6): deoxy Adenosine
  misc_feature (7)..(7): 2'-deoxy-2'-fluoro
  misc_feature (8)..(8): deoxy Adenosine
  misc_feature (9)..(9): 2'-deoxy-2'-fluoro
  misc_feature (10)..(10): deoxy Guanosine
  misc_feature (11)..(12): deoxy Adenosine
  misc_feature (13)..(13): 2'-deoxy-2'-fluoro
  misc_feature (14)..(14): deoxy Guanosine
  misc_feature (15)..(16): 2'-deoxy-2'-fluoro
  misc_feature (17)..(17): deoxy Guanosine
  misc_feature (18)..(19): 2'-deoxy-2'-fluoro
  misc_feature (21)..(21): 3'-3 attached inverted deoxyabasic moiety.
cccgaauaugaaugcuguutt

SEQ ID NO: 4647 - DNA, 21 bp, Artificial Sequence
  Synthetic
  misc_feature (1)..(1): deoxy Adenosine
  misc_feature (2)..(4): 2'-deoxy-2'-fluoro
  misc_feature (5)..(5): deoxy Adenosine
  misc_feature (6)..(6): 2'-deoxy-2'-fluoro
  misc_feature (7)..(7): deoxy Adenosine
  misc_feature (8)..(10): 2'-deoxy-2'-fluoro
  misc_feature (11)..(13): deoxy Guanosine
  misc_feature (14)..(17): 2'-deoxy-2'-fluoro
  misc_feature (18)..(19): deoxy Guanosine
  misc_feature (20)..(21): phosphorothioate linkage
auucauauucgggcuuuggtt

SEQ ID NO: 4648 - DNA, 21 bp, Artificial Sequence
  Synthetic
  misc_feature (1)..(1): 2'-deoxy-2'-fluoro
  misc_feature (2)..(2): deoxy Adenosine
  misc_feature (3)..(3): deoxy Guanosine
  misc_feature (4)..(5): deoxy Adenosine
  misc_feature (6)..(7): 2'-deoxy-2'-fluoro
  misc_feature (8)..(8): deoxy Adenosine
  misc_feature (9)..(9): 2'-deoxy-2'-fluoro
  misc_feature (10)..(10): deoxy Adenosine
  misc_feature (11)..(11): deoxy Guanosine
  misc_feature (12)..(12): 2'-deoxy-2'-fluoro
  misc_feature (13)..(14): deoxy Guanosine
  misc_feature (15)..(16): 2'-deoxy-2'-fluoro
  misc_feature (17)..(17): deoxy Adenosine
  misc_feature (18)..(18): 2'-deoxy-2'-fluoro
  misc_feature (19)..(19): deoxy Guanosine
  misc_feature (20)..(21): phosphorothioate linkage
uagaaucacagcgguuacgtt

SEQ ID NO: 4649 - DNA, 21 bp, Artificial Sequence
  Synthetic
  misc_feature (1)..(4): 2'-deoxy-2'-fluoro
  misc_feature (5)..(6): deoxy Adenosine
  misc_feature (7)..(8): 2'-deoxy-2'-fluoro
  misc_feature (9)..(9): deoxy Guanosine
  misc_feature (10)..(10): 2'-deoxy-2'-fluoro
  misc_feature (11)..(12): deoxy Guanosine
  misc_feature (13)..(15): 2'-deoxy-2'-fluoro
  misc_feature (16)..(16): deoxy Adenosine
  misc_feature (17)..(18): 2'-deoxy-2'-fluoro
  misc_feature (19)..(19): deoxy Guanosine
  misc_feature (20)..(21): phosphorothioate linkage
uuccaaucgugguuuacugtt

SEQ ID NO: 4650 - DNA, 21 bp, Artificial Sequence
  Synthetic
  misc_feature (1)..(1): deoxy Adenosine
  misc_feature (2)..(3): 2'-deoxy-2'-fluoro
  misc_feature (4)..(4): deoxy Adenosine
  misc_feature (5)..(5): 2'-deoxy-2'-fluoro
  misc_feature (6)..(6): deoxy Guanosine
  misc_feature (7)..(7): deoxy Adenosine
  misc_feature (8)..(10): 2'-deoxy-2'-fluoro
  misc_feature (11)..(11): deoxy Guanosine
  misc_feature (12)..(14): 2'-deoxy-2'-fluoro
  misc_feature (15)..(15): deoxy Adenosine
  misc_feature (16)..(16): 2'-deoxy-2'-fluoro
  misc_feature (17)..(17): deoxy Adenosine
  misc_feature (18)..(18): deoxy Guanosine
  misc_feature (19)..(19): 2'-deoxy-2'-fluoro
  misc_feature (20)..(21): phosphorothioate linkage
auuacgauccguucauagctt

SEQ ID NO: 4651 - DNA, 21 bp, Artificial Sequence
  Synthetic
  misc_feature (1)..(1): deoxy Adenosine
  misc_feature (2)..(6): 2'-deoxy-2'-fluoro
  misc_feature (7)..(7): deoxy Adenosine
  misc_feature (8)..(8): deoxy Guanosine
  misc_feature (9)..(10): 2'-deoxy-2'-fluoro
  misc_feature (11)..(12): deoxy Guanosine
  misc_feature (13)..(15): 2'-deoxy-2'-fluoro
  misc_feature (16)..(16): deoxy Adenosine
  misc_feature (17)..(18): 2'-deoxy-2'-fluoro
  misc_feature (19)..(19): deoxy Guanosine
  misc_feature (20)..(21): phosphorothioate linkage
acuuccaguuggcccauugtt

SEQ ID NO: 4652 - DNA, 21 bp, Artificial Sequence
  Synthetic
  misc_feature (1)..(1): deoxy Adenosine
  misc_feature (2)..(3): 2'-deoxy-2'-fluoro
  misc_feature (4)..(4): deoxy Adenosine
  misc_feature (5)..(7): 2'-deoxy-2'-fluoro
  misc_feature (8)..(8): deoxy Adenosine
  misc_feature (9)..(10): deoxy Guanosine
  misc_feature (11)..(11): deoxy Adenosine
  misc_feature (12)..(12): deoxy Guanosine
  misc_feature (13)..(13): 2'-deoxy-2'-fluoro
  misc_feature (14)..(14): deoxy Adenosine
  misc_feature (15)..(18): 2'-deoxy-2'-fluoro
  misc_feature (19)..(19): deoxy Guanosine
  misc_feature (20)..(21): phosphorothiolate linkage
aucaccuaggaguauccugtt

SEQ ID NO: 4653 - DNA, 21 bp, Artificial Sequence
  Synthetic
  misc_feature (1)..(2): 2'-deoxy-2'-fluoro
  misc_feature (3)..(3): deoxy Adenosine
  misc_feature (4)..(5): 2'-deoxy-2'-fluoro
  misc_feature (6)..(6): deoxy Adenosine
  misc_feature (7)..(9): 2'-deoxy-2'-fluoro
  misc_feature (10)..(10): deoxy Adenosine
  misc_feature (11)..(12): deoxy Guanosine
  misc_feature (13)..(13): deoxy Adenosine
  misc_feature (14)..(14): deoxy Guanosine
  misc_feature (15)..(15): 2'-deoxy-2'-fluoro
  misc_feature (16)..(16): deoxy Adenosine
  misc_feature (17)..(19): 2'-deoxy-2'-fluoro
  misc_feature (20)..(21): phosphorothioate linkage
ucaucaccuaggaguaucctt

SEQ ID NO: 4654 - DNA, 21 bp, Artificial Sequence
  Synthetic
  misc_feature (1)..(2): deoxy Adenosine
  misc_feature (3)..(3): 2'-deoxy-2'-fluoro
  misc_feature (4)..(4): deoxy Adenosine
  misc_feature (5)..(5): deoxy Guanosine
  misc_feature (6)..(6): 2'-deoxy-2'-fluoro
  misc_feature (7)..(7): deoxy Adenosine
  misc_feature (8)..(10): 2'-deoxy-2'-fluoro
  misc_feature (11)..(11): deoxy Adenosine
  misc_feature (12)..(12): 2'-deoxy-2'-fluoro
  misc_feature (13)..(13): deoxy Adenosine
  misc_feature (14)..(16): 2'-deoxy-2'-fluoro
  misc_feature (17)..(19): deoxy Guanosine
  misc_feature (20)..(21): phosphorothioate linkage
aacagcauucauauucgggtt

SEQ ID NO: 4655 - DNA, 21 bp, Artificial Sequence
  Synthetic
  misc_feature (1)..(1): 5'-3 attached inverted deoxyabasic moiety.
  misc_feature (1)..(2): 2'-deoxy-2'-fluoro
  misc_feature (3)..(5): 2'-O-methyl Guanosine
  misc_feature (6)..(6): 2'-O-methyl Adenosine
  misc_feature (7)..(9): 2'-deoxy-2'-fluoro
  misc_feature (10)..(10): 2'-O-methyl Guanosine
  misc_feature (11)..(12): 2'-O-methyl Adenosine
  misc_feature (13)..(13): 2'-deoxy-2'-fluoro
  misc_feature (14)..(14): 2'-O-methyl Adenosine
  misc_feature (15)..(15): 2'-deoxy-2'-fluoro
  misc_feature (16)..(16): 2'-O-methyl Guanosine
  misc_feature (17)..(18): 2'-O-methyl Adenosine
  misc_feature (19)..(19): 2'-deoxy-2'-fluoro
  misc_feature (21)..(21): 3'-3 attached inverted deoxyabasic moiety.
ccaaagcccgaauaugaautt

SEQ ID NO: 4656 - DNA, 21 bp, Artificial Sequence
  Synthetic
  misc_feature (1)..(1): 5'-3 attached inverted deoxyabasic moiety.
  misc_feature (1)..(1): 2'-deoxy-2'-fluoro
  misc_feature (2)..(2): 2'-O-methyl Guanosine
  misc_feature (3)..(3): 2'-deoxy-2'-fluoro
  misc_feature (4)..(5): 2'-O-methyl Adenosine
  misc_feature (6)..(7): 2'-deoxy-2'-fluoro
  misc_feature (8)..(8): 2'-O-methyl Guanosine
  misc_feature (9)..(10): 2'-deoxy-2'-fluoro
  misc_feature (11)..(11): 2'-O-methyl Guanosine
  misc_feature (12)..(12): 2'-deoxy-2'-fluoro
  misc_feature (13)..(13): 2'-O-methyl Guanosine
  misc_feature (14)..(14): 2'-O-methyl Adenosine
  misc_feature (15)..(18): 2'-deoxy-2'-fluoro
  misc_feature (19)..(19): 2'-O-methyl Adenosine
  misc_feature (21)..(21): 3'-3 attached inverted deoxyabasic moiety.
cguaaccgcugugauucuatt

SEQ ID NO: 4657 - DNA, 21 bp, Artificial Sequence
  Synthetic
  misc_feature (1)..(1): 5'-3 attached inverted deoxyabasic moiety.
  misc_feature (1)..(1): 2'-deoxy-2'-fluoro
  misc_feature (2)..(2): 2'-O-methyl Adenosine
  misc_feature (3)..(3): 2'-O-methyl Guanosine
  misc_feature (4)..(4): 2'-deoxy-2'-fluoro
  misc_feature (5)..(7): 2'-O-methyl Adenosine
  misc_feature (8)..(9): 2'-deoxy-2'-fluoro
  misc_feature (10)..(10): 2'-O-methyl Adenosine
  misc_feature (11)..(11): 2'-deoxy-2'-fluoro
  misc_feature (12)..(12): 2'-O-methyl Guanosine
  misc_feature (13)..(13): 2'-O-methyl Adenosine
  misc_feature (14)..(15): 2'-deoxy-2'-fluoro
  misc_feature (16)..(17): 2'-O-methyl Guanosine
  misc_feature (18)..(19): 2'-O-methyl Adenosine
  misc_feature (21)..(21): 3'-3 attached inverted deoxyabasic moiety.
caguaaaccacgauuggaatt

SEQ ID NO: 4658 - DNA, 21 bp, Artificial Sequence
  Synthetic
  misc_feature (1)..(1): 5'-3 attached inverted deoxyabasic moiety.
  misc_feature (1)..(1): 2'-O-methyl Guanosine
  misc_feature (2)..(3): 2'-deoxy-2'-fluoro
  misc_feature (4)..(4): 2'-O-methyl Adenosine
  misc_feature (5)..(5): 2'-deoxy-2'-fluoro
  misc_feature (6)..(6): 2'-O-methyl Guanosine
  misc_feature (7)..(8): 2'-O-methyl Adenosine
  misc_feature (9)..(9): 2'-deoxy-2'-fluoro
  misc_feature (10)..(11): 2'-O-methyl Guanosine
  misc_feature (12)..(12): 2'-O-methyl Adenosine
  misc_feature (13)..(14): 2'-deoxy-2'-fluoro
  misc_feature (15)..(15): 2'-O-methyl Guanosine
  misc_feature (16)..(16): 2'-deoxy-2'-fluoro
  misc_feature (17)..(18): 2'-O-methyl Adenosine
  misc_feature (19)..(19): 2'-deoxy-2'-fluoro
  misc_feature (21)..(21): 3'-3 attached inverted deoxyabasic moiety.
gcuaugaacggaucguaautt

SEQ ID NO: 4659 - DNA, 21 bp, Artificial Sequence
  Synthetic
  misc_feature (1)..(1): 5'-3 attached inverted deoxyabasic moiety.
  misc_feature (1)..(1): 2'-deoxy-2'-fluoro
  misc_feature (2)..(3): 2'-O-methyl Adenosine
  misc_feature (4)..(4): 2'-deoxy-2'-fluoro
  misc_feature (5)..(7): 2'-O-methyl Guanosine
  misc_feature (8)..(9): 2'-deoxy-2'-fluoro
  misc_feature (10)..(11): 2'-O-methyl Adenosine
  misc_feature (12)..(13): 2'-deoxy-2'-fluoro
  misc_feature (14)..(15): 2'-O-methyl Guanosine
  misc_feature (16)..(17): 2'-O-methyl Adenosine
  misc_feature (18)..(18): 2'-O-methyl Guanosine
  misc_feature (19)..(19): 2'-deoxy-2'-fluoro
  misc_feature (21)..(21): 3'-3 attached inverted deoxyabasic moiety.
caaugggccaacuggaagutt

SEQ ID NO: 4660 - DNA, 21 bp, Artificial Sequence
  Synthetic
  misc_feature (1)..(1): 5'-3 attached inverted deoxyabasic moiety.
  misc_feature (1)..(1): 2'-deoxy-2'-fluoro
  misc_feature (2)..(2): 2'-O-methyl Adenosine
  misc_feature (3)..(4): 2'-O-methyl Guanosine
  misc_feature (5)..(5): 2'-O-methyl Adenosine
  misc_feature (6)..(6): 2'-deoxy-2'-fluoro
  misc_feature (7)..(7): 2'-O-methyl Adenosine
  misc_feature (8)..(12): 2'-deoxy-2'-fluoro
  misc_feature (13)..(13): 2'-O-methyl Adenosine
  misc_feature (14)..(15): 2'-O-methyl Guanosine
  misc_feature (16)..(16): 2'-deoxy-2'-fluoro
  misc_feature (17)..(17): 2'-O-methyl Guanosine
  misc_feature (18)..(18): 2'-O-methyl Adenosine
  misc_feature (19)..(19): 2'-deoxy-2'-fluoro
  misc_feature (21)..(21): 3'-3 attached inverted deoxyabasic moiety.
caggauacuccuaggugautt

SEQ ID NO: 4661 - DNA, 21 bp, Artificial Sequence
  Synthetic
  misc_feature (1)..(1): 5'-3 attached inverted deoxyabasic moiety.
  misc_feature (1)..(2): 2'-O-methyl Guanosine
  misc_feature (3)..(3): 2'-O-methyl Adenosine
  misc_feature (4)..(4): 2'-deoxy-2'-fluoro
  misc_feature (5)..(5): 2'-O-methyl Adenosine
  misc_feature (6)..(10): 2'-deoxy-2'-fluoro
  misc_feature (11)..(11): 2'-O-methyl Adenosine
  misc_feature (12)..(13): 2'-O-methyl Guanosine
  misc_feature (14)..(14): 2'-deoxy-2'-fluoro
  misc_feature (15)..(15): 2'-O-methyl Guanosine
  misc_feature (16)..(16): 2'-O-methyl Adenosine
  misc_feature (17)..(17): 2'-deoxy-2'-fluoro
  misc_feature (18)..(18): 2'-O-methyl Guanosine
  misc_feature (19)..(19): 2'-O-methyl Adenosine
  misc_feature (21)..(21): 3'-3 attached inverted deoxyabasic moiety.
ggauacuccuaggugaugatt

SEQ ID NO: 4662 - DNA, 21 bp, Artificial Sequence
  Synthetic
  misc_feature (1)..(1): 5'-3 attached inverted deoxyabasic moiety.
  misc_feature (1)..(3): 2'-deoxy-2'-fluoro
  misc_feature (4)..(4): 2'-O-methyl Guanosine
  misc_feature (5)..(6): 2'-O-methyl Adenosine
  misc_feature (7)..(7): 2'-deoxy-2'-fluoro
  misc_feature (8)..(8): 2'-O-methyl Adenosine
  misc_feature (9)..(9): 2'-deoxy-2'-fluoro
  misc_feature (10)..(10): 2'-O-methyl Guanosine
  misc_feature (11)..(12): 2'-O-methyl Adenosine
  misc_feature (13)..(13): 2'-deoxy-2'-fluoro
  misc_feature (14)..(14): 2'-O-methyl Guanosine
  misc_feature (15)..(16): 2'-deoxy-2'-fluoro
  misc_feature (17)..(17): 2'-O-methyl Guanosine
  misc_feature (18)..(19): 2'-deoxy-2'-fluoro
  misc_feature (21)..(21): 3'-3 attached inverted deoxyabasic moiety.
cccgaauaugaaugcuguutt

SEQ ID NO: 4663 - DNA, 21 bp, Artificial Sequence
  Synthetic
  misc_feature (1)..(1): 2'-O-methyl Adenosine
  misc_feature (2)..(4): 2'-deoxy-2'-fluoro
  misc_feature (5)..(5): 2'-O-methyl Adenosine
  misc_feature (6)..(6): 2'-deoxy-2'-fluoro
  misc_feature (7)..(7): 2'-O-methyl Adenosine
  misc_feature (8)..(10): 2'-deoxy-2'-fluoro
  misc_feature (11)..(13): 2'-O-methyl Guanosine
  misc_feature (14)..(17): 2'-deoxy-2'-fluoro
  misc_feature (18)..(19): 2'-O-methyl Guanosine
  misc_feature (20)..(21): phosphorothioate linkage
auucauauucgggcuuuggtt

SEQ ID NO: 4664 - DNA, 21 bp, Artificial Sequence
  Synthetic
  misc_feature (1)..(1): 2'-deoxy-2'-fluoro
  misc_feature (2)..(2): 2'-O-methyl Adenosine
  misc_feature (3)..(3): 2'-O-methyl Guanosine
  misc_feature (4)..(5): 2'-O-methyl Adenosine
  misc_feature (6)..(7): 2'-deoxy-2'-fluoro
  misc_feature (8)..(8): 2'-O-methyl Adenosine
  misc_feature (9)..(9): 2'-deoxy-2'-fluoro
  misc_feature (10)..(10): 2'-O-methyl Adenosine
  misc_feature (11)..(11): 2'-O-methyl Guanosine
  misc_feature (12)..(12): 2'-deoxy-2'-fluoro
  misc_feature (13)..(14): 2'-O-methyl Guanosine
  misc_feature (15)..(16): 2'-deoxy-2'-fluoro
  misc_feature (17)..(17): 2'-O-methyl Adenosine
  misc_feature (18)..(18): 2'-deoxy-2'-fluoro
  misc_feature (19)..(19): 2'-O-methyl Guanosine
  misc_feature (20)..(21): phosphorothioate linkage
uagaaucacagcgguuacgtt

SEQ ID NO: 4665 - DNA, 21 bp, Artificial Sequence
  Synthetic
  misc_feature (1)..(4): 2'-deoxy-2'-fluoro
  misc_feature (5)..(6): 2'-O-methyl Adenosine
  misc_feature (7)..(8): 2'-deoxy-2'-fluoro
  misc_feature (9)..(9): 2'-O-methyl Guanosine
  misc_feature (10)..(10): 2'-deoxy-2'-fluoro
  misc_feature (11)..(12): 2'-O-methyl Guanosine
  misc_feature (13)..(15): 2'-deoxy-2'-fluoro
  misc_feature (16)..(16): 2'-O-methyl Adenosine
  misc_feature (17)..(18): 2'-deoxy-2'-fluoro
  misc_feature (19)..(19): 2'-O-methyl Guanosine
  misc_feature (20)..(21): phosphorothioate linkage
uuccaaucgugguuuacugtt

SEQ ID NO: 4666 - DNA, 21 bp, Artificial Sequence
  Synthetic
  misc_feature (1)..(1): 2'-O-methyl Adenosine
  misc_feature (2)..(3): 2'-deoxy-2'-fluoro
  misc_feature (4)..(4): 2'-O-methyl Adenosine
  misc_feature (5)..(5): 2'-deoxy-2'-fluoro
  misc_feature (6)..(6): 2'-O-methyl Guanosine
  misc_feature (7)..(7): 2'-O-methyl Adenosine
  misc_feature (8)..(10): 2'-deoxy-2'-fluoro
  misc_feature (11)..(11): 2'-O-methyl Guanosine
  misc_feature (12)..(14): 2'-deoxy-2'-fluoro
  misc_feature (15)..(15): 2'-O-methyl Adenosine
  misc_feature (16)..(16): 2'-deoxy-2'-fluoro
  misc_feature (17)..(17): 2'-O-methyl Adenosine
  misc_feature (18)..(18): 2'-O-methyl Guanosine
  misc_feature (19)..(19): 2'-deoxy-2'-fluoro
  misc_feature (20)..(21): phosphorothioate linkage
auuacgauccguucauagctt

SEQ ID NO: 4667 - DNA, 21 bp, Artificial Sequence
  Synthetic
  misc_feature (1)..(1): 2'-O-methyl Adenosine
  misc_feature (2)..(6): 2'-deoxy-2'-fluoro
  misc_feature (7)..(7): 2'-O-methyl Adenosine
  misc_feature (8)..(8): 2'-O-methyl Guanosine
  misc_feature (9)..(10): 2'-deoxy-2'-fluoro
  misc_feature (11)..(12): 2'-O-methyl Guanosine
  misc_feature (13)..(15): 2'-deoxy-2'-fluoro
  misc_feature (16)..(16): 2'-O-methyl Adenosine
  misc_feature (17)..(18): 2'-deoxy-2'-fluoro
  misc_feature (19)..(19): 2'-O-methyl Guanosine
  misc_feature (20)..(21): phosphorothioate linkage
acuuccaguuggcccauugtt

SEQ ID NO: 4668 - DNA, 21 bp, Artificial Sequence
  Synthetic
  misc_feature (1)..(1): 2'-O-methyl Adenosine
  misc_feature (2)..(3): 2'-deoxy-2'-fluoro
  misc_feature (4)..(4): 2'-O-methyl Adenosine
  misc_feature (5)..(7): 2'-deoxy-2'-fluoro
  misc_feature (8)..(8): 2'-O-methyl Adenosine
  misc_feature (9)..(10): 2'-O-methyl Guanosine
  misc_feature (11)..(11): 2'-O-methyl Adenosine
  misc_feature (12)..(12): 2'-O-methyl Guanosine
  misc_feature (13)..(13): 2'-deoxy-2'-fluoro
  misc_feature (14)..(14): 2'-O-methyl Adenosine
  misc_feature (15)..(18): 2'-deoxy-2'-fluoro
  misc_feature (19)..(19): 2'-O-methyl Guanosine
  misc_feature (20)..(21): phosphorothioate linkage
aucaccuaggaguauccugtt

SEQ ID NO: 4669 - DNA, 21 bp, Artificial Sequence
  Synthetic
  misc_feature (1)..(2): 2'-deoxy-2'-fluoro
  misc_feature (3)..(3): 2'-O-methyl Adenosine
  misc_feature (4)..(5): 2'-deoxy-2'-fluoro
  misc_feature (6)..(6): 2'-O-methyl Adenosine
  misc_feature (7)..(9): 2'-deoxy-2'-fluoro
  misc_feature (10)..(10): 2'-O-methyl Adenosine
  misc_feature (11)..(12): 2'-O-methyl Guanosine
  misc_feature (13)..(13): 2'-O-methyl Adenosine
  misc_feature (14)..(14): 2'-O-methyl Guanosine
  misc_feature (15)..(15): 2'-deoxy-2'-fluoro
  misc_feature (16)..(16): 2'-O-methyl Adenosine
  misc_feature (17)..(19): 2'-deoxy-2'-fluoro
  misc_feature (20)..(21): phosphorothioate linkage
ucaucaccuaggaguaucctt

SEQ ID NO: 4670 - DNA, 21 bp, Artificial Sequence
  Synthetic
  misc_feature (1)..(2): 2'-O-methyl Adenosine
  misc_feature (3)..(3): 2'-deoxy-2'-fluoro
  misc_feature (4)..(4): 2'-O-methyl Adenosine
  misc_feature (5)..(5): 2'-O-methyl Guanosine
  misc_feature (6)..(6): 2'-deoxy-2'-fluoro
  misc_feature (7)..(7): 2'-O-methyl Adenosine
  misc_feature (8)..(10): 2'-deoxy-2'-fluoro
  misc_feature (11)..(11): 2'-O-methyl Adenosine
  misc_feature (12)..(12): 2'-deoxy-2'-fluoro
  misc_feature (13)..(13): 2'-O-methyl Adenosine
  misc_feature (14)..(16): 2'-deoxy-2'-fluoro
  misc_feature (17)..(19): 2'-O-methyl Guanosine
  misc_feature (20)..(21): phosphorothioate linkage
aacagcauucauauucgggtt

SEQ ID NO: 4671 - DNA, 21 bp, Artificial Sequence
  Synthetic
  misc_feature (1)..(1): 5'-3 attached inverted deoxyabasic moiety.
  misc_feature (21)..(21): 3'-3 attached inverted deoxyabasic moiety.
ccaaagcccgaauaugaautt

SEQ ID NO: 4672 - DNA, 21 bp, Artificial Sequence
  Synthetic
  misc_feature (1)..(1): 5'-3 attached inverted deoxyabasic moiety.
  misc_feature (21)..(21): 3'-3 attached inverted deoxyabasic moiety.
cguaaccgcugugauucuatt

SEQ ID NO: 4673 - DNA, 21 bp, Artificial Sequence
  Synthetic
  misc_feature (1)..(1): 5'-3 attached inverted deoxyabasic moiety.
  misc_feature (21)..(21): 3'-3 attached inverted deoxyabasic moiety.
caguaaaccacgauuggaatt

SEQ ID NO: 4674 - DNA, 21 bp, Artificial Sequence
  Synthetic
  misc_feature (1)..(1): 5'-3 attached inverted deoxyabasic moiety.
  misc_feature (21)..(21): 3'-3 attached inverted deoxyabasic moiety.
gcuaugaacggaucguaautt

SEQ ID NO: 4675 - DNA, 21 bp, Artificial Sequence
  Synthetic
  misc_feature (1)..(1): 5'-3 attached inverted deoxyabasic moiety.
  misc_feature (21)..(21): 3'-3 attached inverted deoxyabasic moiety.
caaugggccaacuggaagutt

SEQ ID NO: 4676 - DNA, 21 bp, Artificial Sequence
  Synthetic
  misc_feature (1)..(1): 5'-3 attached inverted deoxyabasic moiety.
  misc_feature (21)..(21): 3'-3 attached inverted deoxyabasic moiety.
caggauacuccuaggugautt

SEQ ID NO: 4677 - DNA, 21 bp, Artificial Sequence
  Synthetic
  misc_feature (1)..(1): 5'-3 attached inverted deoxyabasic moiety.
  misc_feature (21)..(21): 3'-3 attached inverted deoxyabasic moiety.
ggauacuccuaggugaugatt

SEQ ID NO: 4678 - DNA, 21 bp, Artificial Sequence
  Synthetic
  misc_feature (1)..(1): 5'-3 attached inverted deoxyabasic moiety.
  misc_feature (21)..(21): 3'-3 attached inverted deoxyabasic moiety.
cccgaauaugaaugcuguutt

SEQ ID NO: 4679 - DNA, 21 bp, Artificial Sequence
  Synthetic
  misc_feature (20)..(21): phosphorothioate linkage
auucauauucgggcuuuggtt

SEQ ID NO: 4680 - DNA, 21 bp, Artificial Sequence
  Synthetic
  misc_feature (20)..(21): phosphorothioate linkage
uagaaucacagcgguuacgtt

SEQ ID NO: 4681 - DNA, 21 bp, Artificial Sequence
  Synthetic
  misc_feature (20)..(21): phosphorothioate linkage
uuccaaucgugguuuacugtt

SEQ ID NO: 4682 - DNA, 21 bp, Artificial Sequence
  Synthetic
  misc_feature (20)..(21): phosphorothioate linkage
auuacgauccguucauagctt

SEQ ID NO: 4683 - DNA, 21 bp, Artificial Sequence
  Synthetic
  misc_feature (20)..(21): phosphorothioate linkage
acuuccaguuggcccauugtt

SEQ ID NO: 4684 - DNA, 21 bp, Artificial Sequence
  Synthetic
  misc_feature (20)..(21): phosphorothioate linkage
aucaccuaggaguauccugtt

SEQ ID NO: 4685 - DNA, 21 bp, Artificial Sequence
  Synthetic
  misc_feature (20)..(21): phosphorothioate linkage
ucaucaccuaggaguaucctt

SEQ ID NO: 4686 - DNA, 21 bp, Artificial Sequence
  Synthetic
  misc_feature (20)..(21): phosphorothioate linkage
aacagcauucauauucgggtt

SEQ ID NO: 4687 - DNA, 21 bp, Artificial Sequence
  Synthetic
  misc_feature (1)..(1): 2'-O-methyl Adenosine
  misc_feature (2)..(4): 2'-deoxy-2'-fluoro
  misc_feature (5)..(5): 2'-O-methyl Adenosine
  misc_feature (6)..(6): 2'-deoxy-2'-fluoro
  misc_feature (7)..(7): 2'-O-methyl Adenosine
  misc_feature (8)..(10): 2'-deoxy-2'-fluoro
  misc_feature (11)..(13): 2'-O-methyl Guanosine
  misc_feature (14)..(17): 2'-deoxy-2'-fluoro
  misc_feature (18)..(19): 2'-O-methyl Guanosine
  misc_feature (21)..(21): 3'-3 attached inverted deoxyabasic moiety.
auucauauucgggcuuuggtt

SEQ ID NO: 4688 - DNA, 21 bp, Artificial Sequence
  Synthetic
  misc_feature (1)..(1): 2'-deoxy-2'-fluoro
  misc_feature (2)..(2): 2'-O-methyl Adenosine
  misc_feature (3)..(3): 2'-O-methyl Guanosine
  misc_feature (4)..(5): 2'-O-methyl Adenosine
  misc_feature (6)..(7): 2'-deoxy-2'-fluoro
  misc_feature (8)..(8): 2'-O-methyl Adenosine
  misc_feature (9)..(9): 2'-deoxy-2'-fluoro
  misc_feature (10)..(10): 2'-O-methyl Adenosine
  misc_feature (11)..(11): 2'-O-methyl Guanosine
  misc_feature (12)..(12): 2'-deoxy-2'-fluoro
  misc_feature (13)..(14): 2'-O-methyl Guanosine
  misc_feature (15)..(16): 2'-deoxy-2'-fluoro
  misc_feature (17)..(17): 2'-O-methyl Adenosine
  misc_feature (18)..(18): 2'-deoxy-2'-fluoro
  misc_feature (19)..(19): 2'--methyl Guanosine
  misc_feature (21)..(21): 3'-3 attached inverted deoxyabasic moiety.
uagaaucacagcgguuacgtt

SEQ ID NO: 4689 - DNA, 21 bp, Artificial Sequence
  Synthetic
  misc_feature (1)..(4): 2'-deoxy-2'-fluoro
  misc_feature (5)..(6): 2'-O-methyl Adenosine
  misc_feature (7)..(8): 2'-deoxy-2'-fluoro
  misc_feature (9)..(9): 2'-O-methyl Guanosine
  misc_feature (10)..(10): 2'-deoxy-2'-fluoro
  misc_feature (11)..(12): 2'-O-methyl Guanosine
  misc_feature (13)..(15): 2'-deoxy-2'-fluoro
  misc_feature (16)..(16): 2'-O-methyl Adenosine
  misc_feature (17)..(18): 2'-deoxy-2'-fluoro
  misc_feature (19)..(19): 2'-O-methyl Guanosine
  misc_feature (21)..(21): 3'-3 attached inverted deoxyabasic moiety.
uuccaaucgugguuuacugtt

SEQ ID NO: 4690 - DNA, 21 bp, Artificial Sequence
  Synthetic
  misc_feature (1)..(1): 2'-O-methyl Adenosine
  misc_feature (2)..(3): 2'-deoxy-2'-fluoro
  misc_feature (4)..(4): 2'-O-methyl Adenosine
  misc_feature (5)..(5): 2'-deoxy-2'-fluoro
  misc_feature (6)..(6): 2'-O-methyl Guanosine
  misc_feature (7)..(7): 2'-O-methyl Adenosine
  misc_feature (8)..(10): 2'-deoxy-2'-fluoro
  misc_feature (11)..(11): 2'-O-methyl Guanosine
  misc_feature (12)..(14): 2'-deoxy-2'-fluoro
  misc_feature (15)..(15): 2'-O-methyl Adenosine
  misc_feature (16)..(16): 2'-deoxy-2'-fluoro
  misc_feature (17)..(17): 2'-O-methyl Adenosine
  misc_feature (18)..(18): 2'-O-methyl Guanosine
  misc_feature (19)..(19): 2'-deoxy-2'-fluoro
  misc_feature (21)..(21): 3'-3 attached inverted deoxyabasic moiety.
auuacgauccguucauagctt

SEQ ID NO: 4691 - DNA, 21 bp, Artificial Sequence
  Synthetic
  misc_feature (1)..(1): 2'-O-methyl Adenosine
  misc_feature (2)..(6): 2'-deoxy-2'-fluoro
  misc_feature (7)..(7): 2'-O-methyl Adenosine
  misc_feature (8)..(8): 2'-O-methyl Guanosine
  misc_feature (9)..(10): 2'-deoxy-2'-fluoro
  misc_feature (11)..(12): 2'-O-methyl Guanosine
  misc_feature (13)..(15): 2'-deoxy-2'-fluoro
  misc_feature (16)..(16): 2'-O-methyl Adenosine
  misc_feature (17)..(18): 2'-deoxy-2'-fluoro
  misc_feature (19)..(19): 2'-O-methyl Guanosine
  misc_feature (21)..(21): 3'-3 attached inverted deoxyabasic moiety.
acuuccaguuggcccauugtt

SEQ ID NO: 4692 - DNA, 21 bp, Artificial Sequence
  Synthetic
  misc_feature (1)..(1): 2'-O-methyl Adenosine
  misc_feature (2)..(3): 2'-deoxy-2'-fluoro
  misc_feature (4)..(4): 2'-O-methyl Adenosine
  misc_feature (5)..(7): 2'-deoxy-2'-fluoro
  misc_feature (8)..(8): 2'-O-methyl Adenosine
  misc_feature (9)..(10): 2'-O-methyl Guanosine
  misc_feature (11)..(11): 2'-O-methyl Adenosine
  misc_feature (12)..(12): 2'-O-methyl Guanosine
  misc_feature (13)..(13): 2'-deoxy-2'-fluoro
  misc_feature (14)..(14): 2'-O-methyl Adenosine
  misc_feature (15)..(18): 2'-deoxy-2'-fluoro
  misc_feature (19)..(19): 2'-O-methyl Guanosine
  misc_feature (21)..(21): 3'-3 attached inverted deoxyabasic moiety.
aucaccuaggaguauccugtt

SEQ ID NO: 4693 - DNA, 21 bp, Artificial Sequence
  Synthetic
  misc_feature (1)..(2): 2'-deoxy-2'-fluoro
  misc_feature (3)..(3): 2'-O-methyl Adenosine
  misc_feature (4)..(5): 2'-deoxy-2'-fluoro
  misc_feature (6)..(6): 2'-O-methyl Adenosine
  misc_feature (7)..(9): 2'-deoxy-2'-fluoro
  misc_feature (10)..(10): 2'-O-methyl Adenosine
  misc_feature (11)..(12): 2'-O-methyl Guanosine
  misc_feature (13)..(13): 2'-O-methyl Adenosine
  misc_feature (14)..(14): 2'-O-methyl Guanosine
  misc_feature (15)..(15): 2'-deoxy-2'-fluoro
  misc_feature (16)..(16): 2'-O-methyl Adenosine
  misc_feature (17)..(19): 2'-deoxy-2'-fluoro
  misc_feature (21)..(21): 3'-3 attached inverted deoxyabasic moiety.
ucaucaccuaggaguaucctt

SEQ ID NO: 4694 - DNA, 21 bp, Artificial Sequence
  Synthetic
  misc_feature (1)..(2): 2'-O-methyl Adenosine
  misc_feature (3)..(3): 2'-deoxy2'-fluoro
  misc_feature (4)..(4): 2'-O-methyl Adenosine
  misc_feature (5)..(5): 2'-O-methyl Guanosine
  misc_feature (6)..(6): 2'-deoxy2'-fluoro
  misc_feature (7)..(7): 2'-O-methyl Adenosine
  misc_feature (8)..(10): 2'-deoxy2'-fluoro
  misc_feature (11)..(11): 2'-O-methyl Adenosine
  misc_feature (12)..(12): 2'-deoxy2'-fluoro
  misc_feature (13)..(13): 2'-O-methyl Adenosine
  misc_feature (14)..(16): 2'-deoxy2'-fluoro
  misc_feature (17)..(19): 2'-O-methyl Guanosine
  misc_feature (21)..(21): 3'-3 attached inverted deoxyabasic moiety.
aacagcauucauauucgggtt

SEQ ID NO: 4695 - DNA, 21 bp, Artificial Sequence
  Synthetic
  misc_feature (21)..(21): 3'-3 attached inverted deoxyabasic moiety.
auucauauucgggcuuuggtt

SEQ ID NO: 4696 - DNA, 21 bp, Artificial Sequence
  Synthetic
  misc_feature (21)..(21): 3'-3 attached inverted deoxyabasic moiety.
uagaaucacagcgguuacgtt

SEQ ID NO: 4697 - DNA, 21 bp, Artificial Sequence
  Synthetic
  misc_feature (21)..(21): 3'-3 attached inverted deoxyabasic moiety.
uuccaaucgugguuuacugtt

SEQ ID NO: 4698 - DNA, 21 bp, Artificial Sequence
  Synthetic
  misc_feature (21)..(21): 3'-3 attached inverted deoxyabasic moiety.
auuacgauccguucauagctt

SEQ ID NO: 4699 - DNA, 21 bp, Artificial Sequence
  Synthetic
  misc_feature (21)..(21): 3'-3 attached inverted deoxyabasic moiety.
acuuccaguuggcccauugtt

SEQ ID NO: 4700 - DNA, 21 bp, Artificial Sequence
  Synthetic
  misc_feature (21)..(21): 3'-3 attached inverted deoxyabasic moiety.
aucaccuaggaguauccugtt

SEQ ID NO: 4701 - DNA, 21 bp, Artificial Sequence
  Synthetic
  misc_feature (21)..(21): 3'-3 attached inverted deoxyabasic moiety.
ucaucaccuaggaguaucctt

SEQ ID NO: 4702 - DNA, 21 bp, Artificial Sequence
  Synthetic
  misc_feature (21)..(21): 3'-3 attached inverted deoxyabasic moiety.
aacagcauucauauucgggtt

SEQ ID NO: 4703 - DNA, 21 bp, Artificial Sequence
  Synthetic
  misc_feature (4)..(4): 2'-deoxy-2'-fluoro
  misc_feature (5)..(5): 2'-O-methyl Adenosine
  misc_feature (6)..(6): 2'-deoxy-2'-fluoro
  misc_feature (7)..(7): 2'-O-methyl Adenosine
  misc_feature (8)..(10): 2'-deoxy-2'-fluoro
  misc_feature (11)..(13): 2'-O-methyl Guanosine
  misc_feature (14)..(17): 2'-deoxy-2'-fluoro
  misc_feature (18)..(19): 2'-O-methyl Guanosine
  misc_feature (20)..(21): phosphorothioate linkage
auucauauucgggcuuuggtt

SEQ ID NO: 4704 - DNA, 21 bp, Artificial Sequence
  Synthetic
  misc_feature (4)..(5): 2'-O-methyl Adenosine
  misc_feature (6)..(7): 2'-deoxy-2'-fluoro
  misc_feature (8)..(8): 2'-O-methyl Adenosine
  misc_feature (9)..(9): 2'-deoxy-2'-fluoro
  misc_feature (10)..(10): 2'-O-methyl Adenosine
  misc_feature (11)..(11): 2'-O-methyl Guanosine
  misc_feature (12)..(12): 2'-deoxy-2'-fluoro
  misc_feature (13)..(14): 2'-O-methyl Guanosine
  misc_feature (15)..(16): 2'-deoxy-2'-fluoro
  misc_feature (17)..(17): 2'-O-methyl Adenosine
  misc_feature (18)..(18): 2'-deoxy-2'-fluoro
  misc_feature (19)..(19): 2'-O-methyl Guanosine
  misc_feature (20)..(21): phosphorothioate linkage
uagaaucacagcgguuacgtt

SEQ ID NO: 4705 - DNA, 21 bp, Artificial Sequence
  Synthetic
  misc_feature (4)..(4): 2'-deoxy-2'-fluoro
  misc_feature (5)..(6): 2'-O-methyl Adenosine
  misc_feature (7)..(8): 2'-deoxy-2'-fluoro
  misc_feature (9)..(9): 2'-O-methyl Guanosine
  misc_feature (10)..(10): 2'-deoxy-2'-fluoro
  misc_feature (11)..(12): 2'-O-methyl Guanosine
  misc_feature (13)..(15): 2'-deoxy-2'-fluoro
  misc_feature (16)..(16): 2'-O-methyl Adenosine
  misc_feature (17)..(18): 2'-deoxy-2'-fluoro
  misc_feature (19)..(19): 2'-O-methyl Guanosine
  misc_feature (20)..(21): phosphorothioate linkage
uuccaaucgugguuuacugtt

SEQ ID NO: 4706 - DNA, 21 bp, Artificial Sequence
  Synthetic
  misc_feature (4)..(4): 2'-O-methyl Adenosine
  misc_feature (5)..(5): 2'-deoxy-2'-fluoro
  misc_feature (6)..(6): 2'-O-methyl Guanosine
  misc_feature (7)..(7): 2'-O-methyl Adenosine
  misc_feature (8)..(10): 2'-deoxy-2'-fluoro
  misc_feature (11)..(11): 2'-O-methyl Guanosine
  misc_feature (12)..(14): 2'-deoxy-2'-fluoro
  misc_feature (15)..(15): 2'-O-methyl Adenosine
  misc_feature (16)..(16): 2'-deoxy-2'-fluoro
  misc_feature (17)..(17): 2'-O-methyl Adenosine
  misc_feature (18)..(18): 2'-O-methyl Guanosine
  misc_feature (19)..(19): 2'-deoxy-2'-fluoro
  misc_feature (20)..(21): phosphorothioate linkage
auuacgauccguucauagctt

SEQ ID NO: 4707 - DNA, 21 bp, Artificial Sequence
  Synthetic
  misc_feature (4)..(6): 2'-deoxy-2'-fluoro
  misc_feature (7)..(7): 2'-O-methyl Adenosine
  misc_feature (8)..(8): 2'-O-methyl Guanosine
  misc_feature (9)..(10): 2'-deoxy-2'-fluoro
  misc_feature (11)..(12): 2'-O-methyl Guanosine
  misc_feature (13)..(15): 2'-deoxy-2'-fluoro
  misc_feature (16)..(16): 2'-O-methyl Adenosine
  misc_feature (17)..(18): 2'-deoxy-2'-fluoro
  misc_feature (19)..(19): 2'-O-methyl Guanosine
  misc_feature (20)..(21): phosphorothioate linkage
acuuccaguuggcccauugtt

SEQ ID NO: 4708 - DNA, 21 bp, Artificial Sequence
  Synthetic
  misc_feature (4)..(4): 2'-O-methyl Adenosine
  misc_feature (5)..(7): 2'-deoxy-2'-fluoro
  misc_feature (8)..(8): 2'-O-methyl Adenosine
  misc_feature (9)..(10): 2'-O-methyl Guanosine
  misc_feature (11)..(11): 2'-O-methyl Adenosine
  misc_feature (12)..(12): 2'-O-methyl Guanosine
  misc_feature (13)..(13): 2'-deoxy-2'-fluoro
  misc_feature (14)..(14): 2'-O-methyl Adenosine
  misc_feature (15)..(18): 2'-deoxy-2'-fluoro
  misc_feature (19)..(19): 2'-O-methyl Guanosine
  misc_feature (20)..(21): phosphorothioate linkage
aucaccuaggaguauccugtt

SEQ ID NO: 4709 - DNA, 21 bp, Artificial Sequence
  Synthetic
  misc_feature (4)..(5): 2'-deoxy-2'-fluoro
  misc_feature (6)..(6): 2'-O-methyl Adenosine
  misc_feature (7)..(9): 2'-deoxy-2'-fluoro
  misc_feature (10)..(10): 2'-O-methyl Adenosine
  misc_feature (11)..(12): 2'-O-methyl Guanosine
  misc_feature (13)..(13): 2'-O-methyl Adenosine
  misc_feature (14)..(14): 2'-O-methyl Guanosine
  misc_feature (15)..(15): 2'-deoxy-2'-fluoro
  misc_feature (16)..(16): 2'-O-methyl Adenosine
  misc_feature (17)..(19): 2'-deoxy-2'-fluoro
  misc_feature (20)..(21): phosphorothioate linkage
ucaucaccuaggaguaucctt

SEQ ID NO: 4710 - DNA, 21 bp, Artificial Sequence
  Synthetic
  misc_feature (4)..(4): 2'-O-methyl Adenosine
  misc_feature (5)..(5): 2'-O-methyl Guanosine
  misc_feature (6)..(6): 2'-deoxy-2'-fluoro
  misc_feature (7)..(7): 2'-O-methyl Adenosine
  misc_feature (8)..(10): 2'-deoxy-2'-fluoro
  misc_feature (11)..(11): 2'-O-methyl Adenosine
  misc_feature (12)..(12): 2'-deoxy-2'-fluoro
  misc_feature (13)..(13): 2'-O-methyl Adenosine
  misc_feature (14)..(16): 2'-deoxy-2'-fluoro
  misc_feature (17)..(19): 2'-O-methyl Guanosine
  misc_feature (20)..(21): phosphorothioate linkage
aacagcauucauauucgggtt

SEQ ID NO: 4711 - RNA, 19 nt, Artificial Sequence
  Synthetic
cuuugggagggccggcccc

SEQ ID NO: 4712 - RNA, 19 nt, Artificial Sequence
  Synthetic
cgggaugcuacacacaacc

SEQ ID NO: 4713 - RNA, 19 nt, Artificial Sequence
  Synthetic
ccagcuguaccagcaugug

SEQ ID NO: 4714 - RNA, 19 nt, Artificial Sequence
  Synthetic
gccagagacacccuggcca

SEQ ID NO: 4715 - RNA, 19 nt, Artificial Sequence
  Synthetic
aaucguguacucgccgcgc

SEQ ID NO: 4716 - RNA, 19 nt, Artificial Sequence
  Synthetic
cuacaacaucaccuucaug

SEQ ID NO: 4717 - RNA, 19 nt, Artificial Sequence
  Synthetic
gggccuggagaagcugcau

SEQ ID NO: 4718 - RNA, 19 nt, Artificial Sequence
  Synthetic
ucccuuugaugccggaaaa

SEQ ID NO: 4719 - RNA, 19 nt, Artificial Sequence
  Synthetic
auggggcaaagugaucaau

SEQ ID NO: 4720 - RNA, 19 nt, Artificial Sequence
  Synthetic
uuuccuaaaagaagagaag

SEQ ID NO: 4721 - RNA, 19 nt, Artificial Sequence
  Synthetic
gcuucugucugacagcaug

SEQ ID NO: 4722 - RNA, 19 nt, Artificial Sequence
  Synthetic
gcugguggaggcgcgggag

SEQ ID NO: 4723 - RNA, 19 nt, Artificial Sequence
  Synthetic
ggccucggaggaggaccug

SEQ ID NO: 4724 - RNA, 19 nt, Artificial Sequence
  Synthetic
gcugguggugcacacgagg

SEQ ID NO: 4725 - RNA, 19 nt, Artificial Sequence
  Synthetic
gcgcuaucuuaaugagcuc

SEQ ID NO: 4726 - RNA, 19 nt, Artificial Sequence
  Synthetic
caagugguccuuugcuguu

SEQ ID NO: 4727 - RNA, 19 nt, Artificial Sequence
  Synthetic
ugcuaccaucacagaaauc

SEQ ID NO: 4728 - RNA, 19 nt, Artificial Sequence
  Synthetic
cccccccguuaucuuccuc

SEQ ID NO: 4729 - RNA, 19 nt, Artificial Sequence
  Synthetic
ccccaacuuccuugugcag

SEQ ID NO: 4730 - RNA, 19 nt, Artificial Sequence
  Synthetic
gaggaaggugcugaggccc

SEQ ID NO: 4731 - RNA, 19 nt, Artificial Sequence
  Synthetic
ccuucggacccagacagga

SEQ ID NO: 4732 - RNA, 19 nt, Artificial Sequence
  Synthetic
aggaaccauaauggcgggg

SEQ ID NO: 4733 - RNA, 19 nt, Artificial Sequence
  Synthetic
gaagcuggcuguggagcga

SEQ ID NO: 4734 - RNA, 19 nt, Artificial Sequence
  Synthetic
aggcugggccaucaacgug

SEQ ID NO: 4735 - RNA, 19 nt, Artificial Sequence
  Synthetic
gggggguggcuuccaccac

SEQ ID NO: 4736 - RNA, 19 nt, Artificial Sequence
  Synthetic
cugcuccagcgaccguggc

SEQ ID NO: 4737 - RNA, 19 nt, Artificial Sequence
  Synthetic
cgggggcuucugugccuau

SEQ ID NO: 4738 - RNA, 19 nt, Artificial Sequence
  Synthetic
ugcggacaucacgcucgcc

SEQ ID NO: 4739 - RNA, 19 nt, Artificial Sequence
  Synthetic
caucaaguuucuguuugag

SEQ ID NO: 4740 - RNA, 19 nt, Artificial Sequence
  Synthetic
gcguguggagggcaucucc

SEQ ID NO: 4741 - RNA, 19 nt, Artificial Sequence
  Synthetic
cagggcuaccaucauugau

SEQ ID NO: 4742 - RNA, 19 nt, Artificial Sequence
  Synthetic
ucuugaugcccaucagggc

SEQ ID NO: 4743 - RNA, 19 nt, Artificial Sequence
  Synthetic
caaugggcaugagcgagac

SEQ ID NO: 4744 - RNA, 19 nt, Artificial Sequence
  Synthetic
cuucauggacgacaagcgu

SEQ ID NO: 4745 - RNA, 19 nt, Artificial Sequence
  Synthetic
uguguacaucauggauguc

SEQ ID NO: 4746 - RNA, 19 nt, Artificial Sequence
  Synthetic
cuacaaccgccacaucuac

SEQ ID NO: 4747 - RNA, 19 nt, Artificial Sequence
  Synthetic
cccaggggaccgcuuugcc

SEQ ID NO: 4748 - RNA, 19 nt, Artificial Sequence
  Synthetic
caagcaggccaucaggcgg

SEQ ID NO: 4749 - RNA, 19 nt, Artificial Sequence
  Synthetic
gaagguggagcuggagugg

SEQ ID NO: 4750 - RNA, 19 nt, Artificial Sequence
  Synthetic
gggcacagaggaugaugag

SEQ ID NO: 4751 - RNA, 19 nt, Artificial Sequence
  Synthetic
guaccuggauaagguggag

SEQ ID NO: 4752 - RNA, 19 nt, Artificial Sequence
  Synthetic
gaggaacaucaagaaaucc

SEQ ID NO: 4753 - RNA, 19 nt, Artificial Sequence
  Synthetic
ccuccaggagcaccugccc

SEQ ID NO: 4754 - RNA, 19 nt, Artificial Sequence
  Synthetic
cgacguggugguauacaau

SEQ ID NO: 4755 - RNA, 19 nt, Artificial Sequence
  Synthetic
ugcaggcaccgacauccuc

SEQ ID NO: 4756 - RNA, 19 nt, Artificial Sequence
  Synthetic
cgagggggaccgccuuggg

SEQ ID NO: 4757 - RNA, 19 nt, Artificial Sequence
  Synthetic
ggggcuguccaucagccca

SEQ ID NO: 4758 - RNA, 19 nt, Artificial Sequence
  Synthetic
agcgggcaucgugaagcgg

SEQ ID NO: 4759 - RNA, 19 nt, Artificial Sequence
  Synthetic
ggaugagcugguguuccgg

SEQ ID NO: 4760 - RNA, 19 nt, Artificial Sequence
  Synthetic
gaugguccguggccgccgg

SEQ ID NO: 4761 - RNA, 19 nt, Artificial Sequence
  Synthetic
ggugcccauccuuauggug

SEQ ID NO: 4762 - RNA, 19 nt, Artificial Sequence
  Synthetic
gaccucaggcggguaccag

SEQ ID NO: 4763 - RNA, 19 nt, Artificial Sequence
  Synthetic
gaagcgcacagcccgcauc

SEQ ID NO: 4764 - RNA, 19 nt, Artificial Sequence
  Synthetic
cauugcugacuccauacuu

SEQ ID NO: 4765 - RNA, 19 nt, Artificial Sequence
  Synthetic
uaaucuguuuggccugggg

SEQ ID NO: 4766 - RNA, 19 nt, Artificial Sequence
  Synthetic
gcucauugggccugaguca

SEQ ID NO: 4767 - RNA, 19 nt, Artificial Sequence
  Synthetic
acccagcgucuccgcacag

SEQ ID NO: 4768 - RNA, 19 nt, Artificial Sequence
  Synthetic
gaacucagacacaccgcug

SEQ ID NO: 4769 - RNA, 19 nt, Artificial Sequence
  Synthetic
gcuucccccugcagugccc

SEQ ID NO: 4770 - RNA, 19 nt, Artificial Sequence
  Synthetic
cugacccuugcugcccugc

SEQ ID NO: 4771 - RNA, 19 nt, Artificial Sequence
  Synthetic
ccugucacguggcccugcc

SEQ ID NO: 4772 - RNA, 19 nt, Artificial Sequence
  Synthetic
cuauccgccccuuagugcu

SEQ ID NO: 4773 - RNA, 19 nt, Artificial Sequence
  Synthetic
uuuuuguuuucuaaccuca

SEQ ID NO: 4774 - RNA, 19 nt, Artificial Sequence
  Synthetic
auggggugguggaggcagc

SEQ ID NO: 4775 - RNA, 19 nt, Artificial Sequence
  Synthetic
ccuucagugagcauggagg

SEQ ID NO: 4776 - RNA, 19 nt, Artificial Sequence
  Synthetic
gggcagggccaucccuggc

SEQ ID NO: 4777 - RNA, 19 nt, Artificial Sequence
  Synthetic
cuggggccuggagcuggcc

SEQ ID NO: 4778 - RNA, 19 nt, Artificial Sequence
  Synthetic
ccuuccucuacuuuucccu

SEQ ID NO: 4779 - RNA, 19 nt, Artificial Sequence
  Synthetic
ugcuggaagccagaagggc

SEQ ID NO: 4780 - RNA, 19 nt, Artificial Sequence
  Synthetic
cuugaggccucuaugggug

SEQ ID NO: 4781 - RNA, 19 nt, Artificial Sequence
  Synthetic
gggggcagaaggcagagcc

SEQ ID NO: 4782 - RNA, 19 nt, Artificial Sequence
  Synthetic
cugugucccagggggaccc

SEQ ID NO: 4783 - RNA, 19 nt, Artificial Sequence
  Synthetic
cacacgaagucaccagccc

SEQ ID NO: 4784 - RNA, 19 nt, Artificial Sequence
  Synthetic
cauagguccagggaggcag

SEQ ID NO: 4785 - RNA, 19 nt, Artificial Sequence
  Synthetic
ggcaguuaacugagaauug

SEQ ID NO: 4786 - RNA, 19 nt, Artificial Sequence
  Synthetic
ggagaggacaggcuagguc

SEQ ID NO: 4787 - RNA, 19 nt, Artificial Sequence
  Synthetic
cccaggcacagcgagggcc

SEQ ID NO: 4788 - RNA, 19 nt, Artificial Sequence
  Synthetic
ccugggcuugggguguucu

SEQ ID NO: 4789 - RNA, 19 nt, Artificial Sequence
  Synthetic
ugguuuugagaacggcaga

SEQ ID NO: 4790 - RNA, 19 nt, Artificial Sequence
  Synthetic
acccaggucggagugagga

SEQ ID NO: 4791 - RNA, 19 nt, Artificial Sequence
  Synthetic
aagcuuccaccuccauccu

SEQ ID NO: 4792 - RNA, 19 nt, Artificial Sequence
  Synthetic
ugacuaggccugcauccua

SEQ ID NO: 4793 - RNA, 19 nt, Artificial Sequence
  Synthetic
aacugggccucccucccuc

SEQ ID NO: 4794 - RNA, 19 nt, Artificial Sequence
  Synthetic
ccccuuggucaugggauuu

SEQ ID NO: 4795 - RNA, 19 nt, Artificial Sequence
  Synthetic
ugcugcccucuuugcccca

SEQ ID NO: 4796 - RNA, 19 nt, Artificial Sequence
  Synthetic
agagcugaagagcuauagg

SEQ ID NO: 4797 - RNA, 19 nt, Artificial Sequence
  Synthetic
gcacugguguggauggccc

SEQ ID NO: 4798 - RNA, 19 nt, Artificial Sequence
  Synthetic
caggaggugcuggagcuag

SEQ ID NO: 4799 - RNA, 19 nt, Artificial Sequence
  Synthetic
ggucuccaggugggccugg

SEQ ID NO: 4800 - RNA, 19 nt, Artificial Sequence
  Synthetic
guucccaggcagcaggugg

SEQ ID NO: 4801 - RNA, 19 nt, Artificial Sequence
  Synthetic
ggaacccugggccuggaug

SEQ ID NO: 4802 - RNA, 19 nt, Artificial Sequence
  Synthetic
gugaggggcggucaggaag

SEQ ID NO: 4803 - RNA, 19 nt, Artificial Sequence
  Synthetic
gggguacagguggguuccc

SEQ ID NO: 4804 - RNA, 19 nt, Artificial Sequence
  Synthetic
cucaucuggaguucccccu

SEQ ID NO: 4805 - RNA, 19 nt, Artificial Sequence
  Synthetic
ucaauaaagcaaggucugg

SEQ ID NO: 4806 - RNA, 19 nt, Artificial Sequence
  Synthetic
gaccugcaaaaaaaaaaaa

SEQ ID NO: 4807 - RNA, 19 nt, Artificial Sequence
  Synthetic
aaaaaaaaaaaaaaaaaaa

SEQ ID NO: 4808 - RNA, 19 nt, Artificial Sequence
  Synthetic
ggggccggcccucccaaag

SEQ ID NO: 4809 - RNA, 19 nt, Artificial Sequence
  Synthetic
gguuguguguagcaucccg

SEQ ID NO: 4810 - RNA, 19 nt, Artificial Sequence
  Synthetic
cacaugcugguacagcugg

SEQ ID NO: 4811 - RNA, 19 nt, Artificial Sequence
  Synthetic
uggccagggugucucuggc

SEQ ID NO: 4812 - RNA, 19 nt, Artificial Sequence
  Synthetic
gcgcggcgaguacacgauu

SEQ ID NO: 4813 - RNA, 19 nt, Artificial Sequence
  Synthetic
caugaaggugauguuguag

SEQ ID NO: 4814 - RNA, 19 nt, Artificial Sequence
  Synthetic
augcagcuucuccaggccc

SEQ ID NO: 4815 - RNA, 19 nt, Artificial Sequence
  Synthetic
uuuuccggcaucaaaggga

SEQ ID NO: 4816 - RNA, 19 nt, Artificial Sequence
  Synthetic
auugaucacuuugccccau

SEQ ID NO: 4817 - RNA, 19 nt, Artificial Sequence
  Synthetic
cuucucuucuuuuaggaaa

SEQ ID NO: 4818 - RNA, 19 nt, Artificial Sequence
  Synthetic
caugcugucagacagaagc

SEQ ID NO: 4819 - RNA, 19 nt, Artificial Sequence
  Synthetic
cucccgcgccuccaccagc

SEQ ID NO: 4820 - RNA, 19 nt, Artificial Sequence
  Synthetic
cagguccuccuccgaggcc

SEQ ID NO: 4821 - RNA, 19 nt, Artificial Sequence
  Synthetic
ccucgugugcaccaccagc

SEQ ID NO: 4822 - RNA, 19 nt, Artificial Sequence
  Synthetic
gagcucauuaagauagcgc

SEQ ID NO: 4823 - RNA, 19 nt, Artificial Sequence
  Synthetic
aacagcaaaggaccacuug

SEQ ID NO: 4824 - RNA, 19 nt, Artificial Sequence
  Synthetic
gauuucugugaugguagca

SEQ ID NO: 4825 - RNA, 19 nt, Artificial Sequence
  Synthetic
gaggaagauaacggggggg

SEQ ID NO: 4826 - RNA, 19 nt, Artificial Sequence
  Synthetic
cugcacaaggaaguugggg

SEQ ID NO: 4827 - RNA, 19 nt, Artificial Sequence
  Synthetic
gggccucagcaccuuccuc

SEQ ID NO: 4828 - RNA, 19 nt, Artificial Sequence
  Synthetic
uccugucuggguccgaagg

SEQ ID NO: 4829 - RNA, 19 nt, Artificial Sequence
  Synthetic
ccccgccauuaugguuccu

SEQ ID NO: 4830 - RNA, 19 nt, Artificial Sequence
  Synthetic
ucgcuccacagccagcuuc

SEQ ID NO: 4831 - RNA, 19 nt, Artificial Sequence
  Synthetic
cacguugauggcccagccu

SEQ ID NO: 4832 - RNA, 19 nt, Artificial Sequence
  Synthetic
gugguggaagccacccccc

SEQ ID NO: 4833 - RNA, 19 nt, Artificial Sequence
  Synthetic
gccacggucgcuggagcag

SEQ ID NO: 4834 - RNA, 19 nt, Artificial Sequence
  Synthetic
auaggcacagaagcccccg

SEQ ID NO: 4835 - RNA, 19 nt, Artificial Sequence
  Synthetic
ggcgagcgugauguccgca

SEQ ID NO: 4836 - RNA, 19 nt, Artificial Sequence
  Synthetic
cucaaacagaaacuugaug

SEQ ID NO: 4837 - RNA, 19 nt, Artificial Sequence
  Synthetic
ggagaugcccuccacacgc

SEQ ID NO: 4838 - RNA, 19 nt, Artificial Sequence
  Synthetic
aucaaugaugguagcccug

SEQ ID NO: 4839 - RNA, 19 nt, Artificial Sequence
  Synthetic
gcccugaugggcaucaaga

SEQ ID NO: 4840 - RNA, 19 nt, Artificial Sequence
  Synthetic
gucucgcucaugcccauug

SEQ ID NO: 4841 - RNA, 19 nt, Artificial Sequence
  Synthetic
acgcuugucguccaugaag

SEQ ID NO: 4842 - RNA, 19 nt, Artificial Sequence
  Synthetic
gacauccaugauguacaca

SEQ ID NO: 4843 - RNA, 19 nt, Artificial Sequence
  Synthetic
guagauguggcgguuguag

SEQ ID NO: 4844 - RNA, 19 nt, Artificial Sequence
  Synthetic
ggcaaagcgguccccuggg

SEQ ID NO: 4845 - RNA, 19 nt, Artificial Sequence
  Synthetic
ccgccugauggccugcuug

SEQ ID NO: 4846 - RNA, 19 nt, Artificial Sequence
  Synthetic
ccacuccagcuccaccuuc

SEQ ID NO: 4847 - RNA, 19 nt, Artificial Sequence
  Synthetic
cucaucauccucugugccc

SEQ ID NO: 4848 - RNA, 19 nt, Artificial Sequence
  Synthetic
cuccaccuuauccagguac

SEQ ID NO: 4849 - RNA, 19 nt, Artificial Sequence
  Synthetic
ggauuucuugauguuccuc

SEQ ID NO: 4850 - RNA, 19 nt, Artificial Sequence
  Synthetic
gggcaggugcuccuggagg

SEQ ID NO: 4851 - RNA, 19 nt, Artificial Sequence
  Synthetic
auuguauaccaccacgucg

SEQ ID NO: 4852 - RNA, 19 nt, Artificial Sequence
  Synthetic
gaggaugucggugccugca

SEQ ID NO: 4853 - RNA, 19 nt, Artificial Sequence
  Synthetic
cccaaggcggucccccucg

SEQ ID NO: 4854 - RNA, 19 nt, Artificial Sequence
  Synthetic
ugggcugauggacagcccc

SEQ ID NO: 4855 - RNA, 19 nt, Artificial Sequence
  Synthetic
ccgcuucacgaugcccgcu

SEQ ID NO: 4856 - RNA, 19 nt, Artificial Sequence
  Synthetic
ccggaacaccagcucaucc

SEQ ID NO: 4857 - RNA, 19 nt, Artificial Sequence
  Synthetic
ccggcggccacggaccauc

SEQ ID NO: 4858 - RNA, 19 nt, Artificial Sequence
  Synthetic
caccauaaggaugggcacc

SEQ ID NO: 4859 - RNA, 19 nt, Artificial Sequence
  Synthetic
cugguacccgccugagguc

SEQ ID NO: 4860 - RNA, 19 nt, Artificial Sequence
  Synthetic
gaugcgggcugugcgcuuc

SEQ ID NO: 4861 - RNA, 19 nt, Artificial Sequence
  Synthetic
aaguauggagucagcaaug

SEQ ID NO: 4862 - RNA, 19 nt, Artificial Sequence
  Synthetic
ccccaggccaaacagauua

SEQ ID NO: 4863 - RNA, 19 nt, Artificial Sequence
  Synthetic
ugacucaggcccaaugagc

SEQ ID NO: 4864 - RNA, 19 nt, Artificial Sequence
  Synthetic
cugugcggagacgcugggu

SEQ ID NO: 4865 - RNA, 19 nt, Artificial Sequence
  Synthetic
cagcggugugucugaguuc

SEQ ID NO: 4866 - RNA, 19 nt, Artificial Sequence
  Synthetic
gggcacugcagggggaagc

SEQ ID NO: 4867 - RNA, 19 nt, Artificial Sequence
  Synthetic
gcagggcagcaagggucag

SEQ ID NO: 4868 - RNA, 19 nt, Artificial Sequence
  Synthetic
ggcagggccacgugacagg

SEQ ID NO: 4869 - RNA, 19 nt, Artificial Sequence
  Synthetic
agcacuaaggggcggauag

SEQ ID NO: 4870 - RNA, 19 nt, Artificial Sequence
  Synthetic
ugagguuagaaaacaaaaa

SEQ ID NO: 4871 - RNA, 19 nt, Artificial Sequence
  Synthetic
gcugccuccaccaccccau

SEQ ID NO: 4872 - RNA, 19 nt, Artificial Sequence
  Synthetic
ccuccaugcucacugaagg

SEQ ID NO: 4873 - RNA, 19 nt, Artificial Sequence
  Synthetic
gccagggauggcccugccc

SEQ ID NO: 4874 - RNA, 19 nt, Artificial Sequence
  Synthetic
ggccagcuccaggccccag

SEQ ID NO: 4875 - RNA, 19 nt, Artificial Sequence
  Synthetic
agggaaaaguagaggaagg

SEQ ID NO: 4876 - RNA, 19 nt, Artificial Sequence
  Synthetic
gcccuucuggcuuccagca

SEQ ID NO: 4877 - RNA, 19 nt, Artificial Sequence
  Synthetic
cacccauagaggccucaag

SEQ ID NO: 4878 - RNA, 19 nt, Artificial Sequence
  Synthetic
ggcucugccuucugccccc

SEQ ID NO: 4879 - RNA, 19 nt, Artificial Sequence
  Synthetic
gggucccccugggacacag

SEQ ID NO: 4880 - RNA, 19 nt, Artificial Sequence
  Synthetic
gggcuggugacuucgugug

SEQ ID NO: 4881 - RNA, 19 nt, Artificial Sequence
  Synthetic
cugccucccuggaccuaug

SEQ ID NO: 4882 - RNA, 19 nt, Artificial Sequence
  Synthetic
caauucucaguuaacugcc

SEQ ID NO: 4883 - RNA, 19 nt, Artificial Sequence
  Synthetic
gaccuagccuguccucucc

SEQ ID NO: 4884 - RNA, 19 nt, Artificial Sequence
  Synthetic
ggcccucgcugugccuggg

SEQ ID NO: 4885 - RNA, 19 nt, Artificial Sequence
  Synthetic
agaacaccccaagcccagg

SEQ ID NO: 4886 - RNA, 19 nt, Artificial Sequence
  Synthetic
ucugccguucucaaaacca

SEQ ID NO: 4887 - RNA, 19 nt, Artificial Sequence
  Synthetic
uccucacuccgaccugggu

SEQ ID NO: 4888 - RNA, 19 nt, Artificial Sequence
  Synthetic
aggauggagguggaagcuu

SEQ ID NO: 4889 - RNA, 19 nt, Artificial Sequence
  Synthetic
uaggaugcaggccuaguca

SEQ ID NO: 4890 - RNA, 19 nt, Artificial Sequence
  Synthetic
gagggagggaggcccaguu

SEQ ID NO: 4891 - RNA, 19 nt, Artificial Sequence
  Synthetic
aaaucccaugaccaagggg

SEQ ID NO: 4892 - RNA, 19 nt, Artificial Sequence
  Synthetic
uggggcaaagagggcagca

SEQ ID NO: 4893 - RNA, 19 nt, Artificial Sequence
  Synthetic
ccuauagcucuucagcucu

SEQ ID NO: 4894 - RNA, 19 nt, Artificial Sequence
  Synthetic
gggccauccacaccagugc

SEQ ID NO: 4895 - RNA, 19 nt, Artificial Sequence
  Synthetic
cuagcuccagcaccuccug

SEQ ID NO: 4896 - RNA, 19 nt, Artificial Sequence
  Synthetic
ccaggcccaccuggagacc

SEQ ID NO: 4897 - RNA, 19 nt, Artificial Sequence
  Synthetic
ccaccugcugccugggaac

SEQ ID NO: 4898 - RNA, 19 nt, Artificial Sequence
  Synthetic
cauccaggcccaggguucc

SEQ ID NO: 4899 - RNA, 19 nt, Artificial Sequence
  Synthetic
cuuccugaccgccccucac

SEQ ID NO: 4900 - RNA, 19 nt, Artificial Sequence
  Synthetic
gggaacccaccuguacccc

SEQ ID NO: 4901 - RNA, 19 nt, Artificial Sequence
  Synthetic
agggggaacuccagaugag

SEQ ID NO: 4902 - RNA, 19 nt, Artificial Sequence
  Synthetic
ccagaccuugcuuuauuga

SEQ ID NO: 4903 - RNA, 19 nt, Artificial Sequence
  Synthetic
uuuuuuuuuuuugcagguc

SEQ ID NO: 4904 - RNA, 19 nt, Artificial Sequence
  Synthetic
uuuuuuuuuuuuuuuuuuu

SEQ ID NO: 4905 - RNA, 23 nt, Artificial Sequence
  Synthetic
cacgcucgccaucaaguuucugu

SEQ ID NO: 4906 - RNA, 23 nt, Artificial Sequence
  Synthetic
cccgacguggugguauacaaugc

SEQ ID NO: 4907 - RNA, 23 nt, Artificial Sequence
  Synthetic
ccgccgggugcccauccuuaugg

SEQ ID NO: 4908 - RNA, 23 nt, Artificial Sequence
  Synthetic
aucauugcugacuccauacuuaa

SEQ ID NO: 4909 - RNA, 23 nt, Artificial Sequence
  Synthetic
ggcaggcaguuaacugagaauug

SEQ ID NO: 4910 - RNA, 23 nt, Artificial Sequence
  Synthetic
gccccgggaugcuacacacaacc

SEQ ID NO: 4911 - RNA, 23 nt, Artificial Sequence
  Synthetic
ucguguacucgccgcgcuacaac

SEQ ID NO: 4912 - RNA, 23 nt, Artificial Sequence
  Synthetic
ugcggacaucacgcucgccauca

SEQ ID NO: 4913 - DNA, 21 bp, Artificial Sequence
  Synthetic
cgcucgccaucaaguuucutt

SEQ ID NO: 4914 - DNA, 21 bp, Artificial Sequence
  Synthetic
cgacguggugguauacaautt

SEQ ID NO: 4915 - DNA, 21 bp, Artificial Sequence
  Synthetic
gccgggugcccauccuuautt

SEQ ID NO: 4916 - DNA, 21 bp, Artificial Sequence
  Synthetic
cauugcugacuccauacuutt

SEQ ID NO: 4917 - DNA, 21 bp, Artificial Sequence
  Synthetic
caggcaguuaacugagaautt

SEQ ID NO: 4918 - DNA, 21 bp, Artificial Sequence
  Synthetic
cccgggaugcuacacacaatt

SEQ ID NO: 4919 - DNA, 21 bp, Artificial Sequence
  Synthetic
guguacucgccgcgcuacatt

SEQ ID NO: 4920 - DNA, 21 bp, Artificial Sequence
  Synthetic
cggacaucacgcucgccautt

SEQ ID NO: 4921 - DNA, 21 bp, Artificial Sequence
  Synthetic
agaaacuugauggcgagcgtt

SEQ ID NO: 4922 - DNA, 21 bp, Artificial Sequence
  Synthetic
auuguauaccaccacgucgtt

SEQ ID NO: 4923 - DNA, 21 bp, Artificial Sequence
  Synthetic
auaaggaugggcacccggctt

SEQ ID NO: 4924 - DNA, 21 bp, Artificial Sequence
  Synthetic
aaguauggagucagcaaugtt

SEQ ID NO: 4925 - DNA, 21 bp, Artificial Sequence
  Synthetic
auucucaguuaacugccugtt

SEQ ID NO: 4926 - DNA, 21 bp, Artificial Sequence
  Synthetic
uuguguguagcaucccgggtt

SEQ ID NO: 4927 - DNA, 21 bp, Artificial Sequence
  Synthetic
uguagcgcggcgaguacactt

SEQ ID NO: 4928 - DNA, 21 bp, Artificial Sequence
  Synthetic
auggcgagcgugauguccgtt

SEQ ID NO: 4929 - DNA, 21 bp, Artificial Sequence
  Synthetic
  misc_feature (1)..(1): 5'-3 attached inverted deoxyabasic moiety.
  misc_feature (1)..(1): 2'- deoxy-2'-fluoro
  misc_feature (3)..(5): 2'- deoxy-2'-fluoro
  misc_feature (7)..(8): 2'- deoxy-2'-fluoro
  misc_feature (10)..(11): 2'- deoxy-2'-fluoro
  misc_feature (15)..(19): 2'- deoxy-2'-fluoro
  misc_feature (21)..(21): 3'-3 attached inverted deoxyabasic moiety.
cgcucgccaucaaguuucutt

SEQ ID NO: 4930 - DNA, 21 bp, Artificial Sequence
  Synthetic
  misc_feature (1)..(1): 5'-3 attached inverted deoxyabasic moiety.
  misc_feature (1)..(1): 2'- deoxy-2'-fluoro
  misc_feature (4)..(4): 2'- deoxy-2'-fluoro
  misc_feature (6)..(6): 2'- deoxy-2'-fluoro
  misc_feature (9)..(9): 2'- deoxy-2'-fluoro
  misc_feature (12)..(12): 2'- deoxy-2'-fluoro
  misc_feature (14)..(14): 2'- deoxy-2'-fluoro
  misc_feature (16)..(16): 2'- deoxy-2'-fluoro
  misc_feature (19)..(19): 2'- deoxy-2'-fluoro
  misc_feature (21)..(21): 3'-3 attached inverted deoxyabasic moiety.
cgacguggugguauacaautt

SEQ ID NO: 4931 - DNA, 21 bp, Artificial Sequence
  Synthetic
  misc_feature (1)..(1): 5'-3 attached inverted deoxyabasic moiety.
  misc_feature (2)..(3): 2'- deoxy-2'-fluoro
  misc_feature (7)..(7): 2'- deoxy-2'-fluoro
  misc_feature (9)..(11): 2'- deoxy-2'-fluoro
  misc_feature (13)..(17): 2'- deoxy-2'-fluoro
  misc_feature (19)..(19): 2'- deoxy-2'-fluoro
  misc_feature (21)..(21): 3'-3 attached inverted deoxyabasic moiety.
gccgggugcccauccuuautt

SEQ ID NO: 4932 - DNA, 21 bp, Artificial Sequence
  Synthetic
  misc_feature (1)..(1): 5'-3 attached inverted deoxyabasic moiety.
  misc_feature (1)..(1): 2'- deoxy-2'-fluoro
  misc_feature (3)..(4): 2'- deoxy-2'-fluoro
  misc_feature (6)..(7): 2'- deoxy-2'-fluoro
  misc_feature (10)..(13): 2'- deoxy-2'-fluoro
  misc_feature (15)..(15): 2'- deoxy-2'-fluoro
  misc_feature (17)..(19): 2'- deoxy-2'-fluoro
  misc_feature (21)..(21): 3'-3 attached inverted deoxyabasic moiety.
cauugcugacuccauacuutt

SEQ ID NO: 4933 - DNA, 21 bp, Artificial Sequence
  Synthetic
  misc_feature (1)..(1): 5'-3 attached inverted deoxyabasic moiety.
  misc_feature (1)..(1): 2'- deoxy-2'-fluoro
  misc_feature (5)..(5): 2'- deoxy-2'-fluoro
  misc_feature (8)..(9): 2'- deoxy-2'-fluoro
  misc_feature (12)..(13): 2'- deoxy-2'-fluoro
  misc_feature (19)..(19): 2'- deoxy-2'-fluoro
  misc_feature (21)..(21): 3'-3 attached inverted deoxyabasic moiety.
caggcaguuaacugagaautt

SEQ ID NO: 4934 - DNA, 21 bp, Artificial Sequence
  Synthetic
  misc_feature (1)..(1): 5'-3 attached inverted deoxyabasic moiety.
  misc_feature (1)..(3): 2'- deoxy-2'-fluoro
  misc_feature (8)..(8): 2'- deoxy-2'-fluoro
  misc_feature (10)..(11): 2'- deoxy-2'-fluoro
  misc_feature (13)..(13): 2'- deoxy-2'-fluoro
  misc_feature (15)..(15): 2'- deoxy-2'-fluoro
  misc_feature (17)..(17): 2'- deoxy-2'-fluoro
  misc_feature (21)..(21): 3'-3 attached inverted deoxyabasic moiety.
cccgggaugcuacacacaatt

SEQ ID NO: 4935 - DNA, 21 bp, Artificial Sequence
  Synthetic
  misc_feature (1)..(1): 5'-3 attached inverted deoxyabasic moiety.
  misc_feature (2)..(2): 2'- deoxy-2'-fluoro
  misc_feature (4)..(4): 2'- deoxy-2'-fluoro
  misc_feature (6)..(8): 2'- deoxy-2'-fluoro
  misc_feature (10)..(11): 2'- deoxy-2'-fluoro
  misc_feature (13)..(13): 2'- deoxy-2'-fluoro
  misc_feature (15)..(16): 2'- deoxy-2'-fluoro
  misc_feature (18)..(18): 2'- deoxy-2'-fluoro
  misc_feature (21)..(21): 3'-3 attached inverted deoxyabasic moiety.
guguacucgccgcgcuacatt

SEQ ID NO: 4936 - DNA, 21 bp, Artificial Sequence
  Synthetic
  misc_feature (1)..(1): 5'-3 attached inverted deoxyabasic moiety.
  misc_feature (1)..(1): 2'- deoxy-2'-fluoro
  misc_feature (5)..(5): 2'- deoxy-2'-fluoro
  misc_feature (7)..(8): 2'- deoxy-2'-fluoro
  misc_feature (10)..(10): 2'- deoxy-2'-fluoro
  misc_feature (12)..(14): 2'- deoxy-2'-fluoro
  misc_feature (16)..(17): 2'- deoxy-2'-fluoro
  misc_feature (19)..(19): 2'- deoxy-2'-fluoro
  misc_feature (21)..(21): 3'-3 attached inverted deoxyabasic moiety.
cggacaucacgcucgccautt

SEQ ID NO: 4937 - DNA, 21 bp, Artificial Sequence
  Synthetic
  misc_feature (6)..(8): 2'- deoxy-2'-fluoro
  misc_feature (11)..(11): 2'- deoxy-2'-fluoro
  misc_feature (14)..(14): 2'- deoxy-2'-fluoro
  misc_feature (18)..(18): 2'- deoxy-2'-fluoro
  misc_feature (20)..(21): phosphorothioate linkage
agaaacuugauggcgagcgtt

SEQ ID NO: 4938 - DNA, 21 bp, Artificial Sequence
  Synthetic
  misc_feature (2)..(3): 2'- deoxy-2'-fluoro
  misc_feature (5)..(5): 2'- deoxy-2'-fluoro
  misc_feature (7)..(7): 2'- deoxy-2'-fluoro
  misc_feature (9)..(10): 2'- deoxy-2'-fluoro
  misc_feature (12)..(13): 2'- deoxy-2'-fluoro
  misc_feature (15)..(15): 2'- deoxy-2'-fluoro
  misc_feature (17)..(18): 2'- deoxy-2'-fluoro
  misc_feature (20)..(21): phosphorothioate linkage
auuguauaccaccacgucgtt

SEQ ID NO: 4939 - DNA, 21 bp, Artificial Sequence
  Synthetic
  misc_feature (2)..(2): 2'- deoxy-2'-fluoro
  misc_feature (8)..(8): 2'- deoxy-2'-fluoro
  misc_feature (12)..(12): 2'- deoxy-2'-fluoro
  misc_feature (14)..(16): 2'- deoxy-2'-fluoro
  misc_feature (19)..(19): 2'- deoxy-2'-fluoro
  misc_feature (20)..(21): phosphorothioate linkage
auaaggaugggcacccggctt

SEQ ID NO: 4940 - DNA, 21 bp, Artificial Sequence
  Synthetic
  misc_feature (4)..(4): 2'- deoxy-2'-fluoro
  misc_feature (6)..(6): 2'- deoxy-2'-fluoro
  misc_feature (11)..(12): 2'- deoxy-2'-fluoro
  misc_feature (15)..(15): 2'- deoxy-2'-fluoro
  misc_feature (18)..(18): 2'- deoxy-2'-fluoro
  misc_feature (20)..(21): phosphorothioate linkage
aaguauggagucagcaaugtt

SEQ ID NO: 4941 - DNA, 21 bp, Artificial Sequence
  Synthetic
  misc_feature (2)..(6): 2'- deoxy-2'-fluoro
  misc_feature (9)..(10): 2'- deoxy-2'-fluoro
  misc_feature (13)..(14): 2'- deoxy-2'-fluoro
  misc_feature (16)..(18): 2'- deoxy-2'-fluoro
  misc_feature (20)..(21): phosphorothioate linkage
auucucaguuaacugccugtt

SEQ ID NO: 4942 - DNA, 21 bp, Artificial Sequence
  Synthetic
  misc_feature (1)..(2): 2'- deoxy-2'-fluoro
  misc_feature (4)..(4): 2'- deoxy-2'-fluoro
  misc_feature (6)..(6): 2'- deoxy-2'-fluoro
  misc_feature (8)..(8): 2'- deoxy-2'-fluoro
  misc_feature (11)..(11): 2'- deoxy-2'-fluoro
  misc_feature (13)..(16): 2'- deoxy-2'-fluoro
  misc_feature (20)..(21): phosphorothioate linkage
uuguguguagcaucccgggtt

SEQ ID NO: 4943 - DNA, 21 bp, Artificial Sequence
  Synthetic
  misc_feature (1)..(1): 2'- deoxy-2'-fluoro
  misc_feature (3)..(3): 2'- deoxy-2'-fluoro
  misc_feature (6)..(6): 2'- deoxy-2'-fluoro
  misc_feature (8)..(8): 2'- deoxy-2'-fluoro
  misc_feature (11)..(11): 2'- deoxy-2'-fluoro
  misc_feature (15)..(15): 2'- deoxy-2'-fluoro
  misc_feature (17)..(17): 2'- deoxy-2'-fluoro
  misc_feature (19)..(19): 2'- deoxy-2'-fluoro
  misc_feature (20)..(21): phosphorothioate linkage
uguagcgcggcgaguacactt

SEQ ID NO: 4944 - DNA, 21 bp, Artificial Sequence
  Synthetic
  misc_feature (2)..(2): 2'- deoxy-2'-fluoro
  misc_feature (5)..(5): 2'- deoxy-2'-fluoro
  misc_feature (9)..(9): 2'- deoxy-2'-fluoro
  misc_feature (11)..(11): 2'- deoxy-2'-fluoro
  misc_feature (14)..(14): 2'- deoxy-2'-fluoro
  misc_feature (16)..(18): 2'- deoxy-2'-fluoro
  misc_feature (20)..(21): phosphorothioate linkage
auggcgagcgugauguccgtt

SEQ ID NO: 4945 - DNA, 21 bp, Artificial Sequence
  Synthetic
  misc_feature (1)..(1): 5'-3 attached inverted deoxyabasic moiety.
  misc_feature (1)..(1): 2'- deoxy-2'-fluoro
  misc_feature (2)..(2): deoxy
  misc_feature (3)..(5): 2'- deoxy-2'-fluoro
  misc_feature (6)..(6): deoxy
  misc_feature (7)..(8): 2'- deoxy-2'-fluoro
  misc_feature (9)..(9): deoxy
  misc_feature (10)..(11): 2'- deoxy-2'-fluoro
  misc_feature (12)..(14): deoxy
  misc_feature (15)..(19): 2'- deoxy-2'-fluoro
  misc_feature (21)..(21): 3'-3 attached inverted deoxyabasic moiety.
cgcucgccaucaaguuucutt

SEQ ID NO: 4946 - DNA, 21 bp, Artificial Sequence
  Synthetic
  misc_feature (1)..(1): 5'-3 attached inverted deoxyabasic moiety.
  misc_feature (1)..(1): 2'- deoxy-2'-fluoro
  misc_feature (2)..(3): deoxy
  misc_feature (4)..(4): 2'- deoxy-2'-fluoro
  misc_feature (5)..(5): deoxy
  misc_feature (6)..(6): 2'- deoxy-2'-fluoro
  misc_feature (7)..(8): deoxy
  misc_feature (9)..(9): 2'- deoxy-2'-fluoro
  misc_feature (10)..(11): deoxy
  misc_feature (12)..(12): 2'- deoxy-2'-fluoro
  misc_feature (13)..(13): deoxy
  misc_feature (14)..(14): 2'- deoxy-2'-fluoro
  misc_feature (15)..(15): deoxy
  misc_feature (16)..(16): 2'- deoxy-2'-fluoro
  misc_feature (17)..(18): deoxy
  misc_feature (19)..(19): 2'- deoxy-2'-fluoro
  misc_feature (21)..(21): 3'-3 attached inverted deoxyabasic moiety.
cgacguggugguauacaautt

SEQ ID NO: 4947 - DNA, 21 bp, Artificial Sequence
  Synthetic
  misc_feature (1)..(1): 5'-3 attached inverted deoxyabasic moiety.
  misc_feature (1)..(1): deoxy
  misc_feature (2)..(3): 2'- deoxy-2'-fluoro
  misc_feature (4)..(6): deoxy
  misc_feature (7)..(7): 2'- deoxy-2'-fluoro
  misc_feature (8)..(8): deoxy
  misc_feature (9)..(11): 2'- deoxy-2'-fluoro
  misc_feature (12)..(12): deoxy
  misc_feature (13)..(17): 2'- deoxy-2'-fluoro
  misc_feature (18)..(18): deoxy
  misc_feature (19)..(19): 2'- deoxy-2'-fluoro
  misc_feature (21)..(21): 3'-3 attached inverted deoxyabasic moiety.
gccgggugcccauccuuautt

SEQ ID NO: 4948 - DNA, 21 bp, Artificial Sequence
  Synthetic
  misc_feature (1)..(1): 5'-3 attached inverted deoxyabasic moiety.
  misc_feature (1)..(1): 2'- deoxy-2'-fluoro
  misc_feature (2)..(2): deoxy
  misc_feature (3)..(4): 2'- deoxy-2'-fluoro
  misc_feature (5)..(5): deoxy
  misc_feature (6)..(7): 2'- deoxy-2'-fluoro
  misc_feature (8)..(9): deoxy
  misc_feature (10)..(13): 2'- deoxy-2'-fluoro
  misc_feature (14)..(14): deoxy
  misc_feature (15)..(15): 2'- deoxy-2'-fluoro
  misc_feature (16)..(19): 2'- deoxy-2'-fluoro
  misc_feature (16)..(16): deoxy
  misc_feature (21)..(21): 3'-3 attached inverted deoxyabasic moiety.
cauugcugacuccauacuutt

SEQ ID NO: 4949 - DNA, 21 bp, Artificial Sequence
  Synthetic
  misc_feature (1)..(1): 2'- deoxy-2'-fluoro
  misc_feature (1)..(1): 5'-3 attached inverted deoxyabasic moiety.
  misc_feature (2)..(4): deoxy
  misc_feature (5)..(5): 2'- deoxy-2'-fluoro
  misc_feature (6)..(7): deoxy
  misc_feature (8)..(9): 2'- deoxy-2'-fluoro
  misc_feature (10)..(11): deoxy
  misc_feature (12)..(13): 2'- deoxy-2'-fluoro
  misc_feature (14)..(18): deoxy
  misc_feature (19)..(19): 2'- deoxy-2'-fluoro
  misc_feature (21)..(21): 3'-3 attached inverted deoxyabasic moiety.
caggcaguuaacugagaautt

SEQ ID NO: 4950 - DNA, 21 bp, Artificial Sequence
  Synthetic
  misc_feature (1)..(1): 5'-3 attached inverted deoxyabasic moiety.
  misc_feature (1)..(3): 2'- deoxy-2'-fluoro
  misc_feature (4)..(7): deoxy
  misc_feature (8)..(8): 2'- deoxy-2'-fluoro
  misc_feature (9)..(9): deoxy
  misc_feature (10)..(11): 2'- deoxy-2'-fluoro
  misc_feature (12)..(12): deoxy
  misc_feature (13)..(13): 2'- deoxy-2'-fluoro
  misc_feature (14)..(14): deoxy
  misc_feature (15)..(15): 2'- deoxy-2'-fluoro
  misc_feature (16)..(16): deoxy
  misc_feature (17)..(17): 2'- deoxy-2'-fluoro
  misc_feature (18)..(19): deoxy
  misc_feature (21)..(21): 3'-3 attached inverted deoxyabasic moiety.
cccgggaugcuacacacaatt

SEQ ID NO: 4951 - DNA, 21 bp, Artificial Sequence
  Synthetic
  misc_feature (1)..(1): 5'-3 attached inverted deoxyabasic moiety.
  misc_feature (1)..(1): deoxy
  misc_feature (2)..(2): 2'- deoxy-2'-fluoro
  misc_feature (3)..(3): deoxy
  misc_feature (4)..(4): 2'- deoxy-2'-fluoro
  misc_feature (5)..(5): deoxy
  misc_feature (6)..(8): 2'- deoxy-2'-fluoro
  misc_feature (9)..(9): deoxy
  misc_feature (10)..(11): 2'- deoxy-2'-fluoro
  misc_feature (12)..(12): deoxy
  misc_feature (13)..(13): 2'- deoxy-2'-fluoro
  misc_feature (14)..(14): deoxy
  misc_feature (15)..(16): 2'- deoxy-2'-fluoro
  misc_feature (17)..(17): deoxy
  misc_feature (18)..(18): 2'- deoxy-2'-fluoro
  misc_feature (19)..(19): deoxy
  misc_feature (21)..(21): 3'-3 attached inverted deoxyabasic moiety.
guguacucgccgcgcuacatt

SEQ ID NO: 4952 - DNA, 21 bp, Artificial Sequence
  Synthetic
  misc_feature (1)..(1): 5'-3 attached inverted deoxyabasic moiety.
  misc_feature (1)..(1): 2'- deoxy-2'-fluoro
  misc_feature (2)..(4): deoxy
  misc_feature (5)..(5): 2'- deoxy-2'-fluoro
  misc_feature (6)..(6): deoxy
  misc_feature (7)..(8): 2'- deoxy-2'-fluoro
  misc_feature (9)..(9): deoxy
  misc_feature (10)..(10): 2'- deoxy-2'-fluoro
  misc_feature (11)..(11): deoxy
  misc_feature (12)..(14): 2'- deoxy-2'-fluoro
  misc_feature (15)..(15): deoxy
  misc_feature (16)..(17): 2'- deoxy-2'-fluoro
  misc_feature (18)..(18): deoxy
  misc_feature (19)..(19): 2'- deoxy-2'-fluoro
  misc_feature (21)..(21): 3'-3 attached inverted deoxyabasic moiety.
cggacaucacgcucgccautt

SEQ ID NO: 4953 - DNA, 21 bp, Artificial Sequence
  Synthetic
  misc_feature (1)..(5): deoxy
  misc_feature (6)..(8): 2'- deoxy-2'-fluoro
  misc_feature (9)..(10): deoxy
  misc_feature (11)..(11): 2'- deoxy-2'-fluoro
  misc_feature (12)..(13): deoxy
  misc_feature (14)..(14): 2'- deoxy-2'-fluoro
  misc_feature (15)..(17): deoxy
  misc_feature (18)..(18): 2'- deoxy-2'-fluoro
  misc_feature (19)..(19): deoxy
  misc_feature (20)..(21): phosphorothioate linkage
agaaacuugauggcgagcgtt

SEQ ID NO: 4954 - DNA, 21 bp, Artificial Sequence
  Synthetic
  misc_feature (1)..(1): deoxy
  misc_feature (2)..(3): 2'- deoxy-2'-fluoro
  misc_feature (4)..(4): deoxy
  misc_feature (5)..(5): 2'- deoxy-2'-fluoro
  misc_feature (6)..(6): deoxy
  misc_feature (7)..(7): 2'- deoxy-2'-fluoro
  misc_feature (8)..(8): deoxy
  misc_feature (9)..(10): 2'- deoxy-2'-fluoro
  misc_feature (11)..(11): deoxy
  misc_feature (12)..(13): 2'- deoxy-2'-fluoro
  misc_feature (14)..(14): deoxy
  misc_feature (15)..(15): 2'- deoxy-2'-fluoro
  misc_feature (16)..(16): deoxy
  misc_feature (17)..(18): 2'- deoxy-2'-fluoro
  misc_feature (19)..(19): deoxy
  misc_feature (20)..(21): phosphorothioate linkage
auuguauaccaccacgucgtt

SEQ ID NO: 4955 - DNA, 21 bp, Artificial Sequence
  Synthetic
  misc_feature (1)..(1): deoxy
  misc_feature (2)..(2): 2'- deoxy-2'-fluoro
  misc_feature (3)..(7): deoxy
  misc_feature (8)..(8): 2'- deoxy-2'-fluoro
  misc_feature (9)..(11): deoxy
  misc_feature (12)..(12): 2'- deoxy-2'-fluoro
  misc_feature (13)..(13): deoxy
  misc_feature (14)..(16): 2'- deoxy-2'-fluoro
  misc_feature (17)..(18): deoxy
  misc_feature (19)..(19): 2'- deoxy-2'-fluoro
  misc_feature (20)..(21): phosphorothioate linkage
auaaggaugggcacccggctt

SEQ ID NO: 4956 - DNA, 21 bp, Artificial Sequence
  Synthetic
  misc_feature (1)..(3): deoxy
  misc_feature (4)..(4): 2'- deoxy-2'-fluoro
  misc_feature (5)..(5): deoxy
  misc_feature (6)..(6): 2'- deoxy-2'-fluoro
  misc_feature (7)..(10): deoxy
  misc_feature (11)..(12): 2'- deoxy-2'-fluoro
  misc_feature (13)..(14): deoxy
  misc_feature (15)..(15): 2'- deoxy-2'-fluoro
  misc_feature (16)..(17): deoxy
  misc_feature (18)..(18): 2'- deoxy-2'-fluoro
  misc_feature (19)..(19): deoxy
  misc_feature (20)..(21): phosphorothioate linkage
aaguauggagucagcaaugtt

SEQ ID NO: 4957 - DNA, 21 bp, Artificial Sequence
  Synthetic
  misc_feature (1)..(1): deoxy
  misc_feature (2)..(6): 2'- deoxy-2'-fluoro
  misc_feature (7)..(8): deoxy
  misc_feature (9)..(10): 2'- deoxy-2'-fluoro
  misc_feature (11)..(12): deoxy
  misc_feature (13)..(14): 2'- deoxy-2'-fluoro
  misc_feature (15)..(15): deoxy
  misc_feature (16)..(18): 2'- deoxy-2'-fluoro
  misc_feature (19)..(19): deoxy
  misc_feature (20)..(21): phosphorothioate linkage
auucucaguuaacugccugtt

SEQ ID NO: 4958 - DNA, 21 bp, Artificial Sequence
  Synthetic
  misc_feature (1)..(2): 2'- deoxy-2'-fluoro
  misc_feature (3)..(3): deoxy
  misc_feature (4)..(4): 2'- deoxy-2'-fluoro
  misc_feature (5)..(5): deoxy
  misc_feature (6)..(6): 2'- deoxy-2'-fluoro
  misc_feature (7)..(7): deoxy
  misc_feature (8)..(8): 2'- deoxy-2'-fluoro
  misc_feature (9)..(10): deoxy
  misc_feature (11)..(11): 2'- deoxy-2'-fluoro
  misc_feature (12)..(12): deoxy
  misc_feature (13)..(16): 2'- deoxy-2'-fluoro
  misc_feature (17)..(19): deoxy
  misc_feature (20)..(21): phosphorothioate linkage
uuguguguagcaucccgggtt

SEQ ID NO: 4959 - DNA, 21 bp, Artificial Sequence
  Synthetic
  misc_feature (1)..(1): 2'- deoxy-2'-fluoro
  misc_feature (2)..(2): deoxy
  misc_feature (3)..(3): 2'- deoxy-2'-fluoro
  misc_feature (4)..(5): deoxy
  misc_feature (6)..(6): 2'- deoxy-2'-fluoro
  misc_feature (7)..(7): deoxy
  misc_feature (8)..(8): 2'- deoxy-2'-fluoro
  misc_feature (9)..(10): deoxy
  misc_feature (11)..(11): 2'- deoxy-2'-fluoro
  misc_feature (12)..(14): deoxy
  misc_feature (15)..(15): 2'- deoxy-2'-fluoro
  misc_feature (16)..(16): deoxy
  misc_feature (17)..(17): 2'- deoxy-2'-fluoro
  misc_feature (18)..(18): deoxy
  misc_feature (19)..(19): 2'- deoxy-2'-fluoro
  misc_feature (20)..(21): phosphorothioate linkage
uguagcgcggcgaguacactt

SEQ ID NO: 4960 - DNA, 21 bp, Artificial Sequence
  Synthetic
  misc_feature (1)..(1): deoxy
  misc_feature (2)..(2): 2'- deoxy-2'-fluoro
  misc_feature (3)..(4): deoxy
  misc_feature (5)..(5): 2'- deoxy-2'-fluoro
  misc_feature (6)..(8): deoxy
  misc_feature (9)..(9): 2'- deoxy-2'-fluoro
  misc_feature (10)..(10): deoxy
  misc_feature (11)..(11): 2'- deoxy-2'-fluoro
  misc_feature (12)..(13): deoxy
  misc_feature (14)..(14): 2'- deoxy-2'-fluoro
  misc_feature (15)..(15): deoxy
  misc_feature (16)..(18): 2'- deoxy-2'-fluoro
  misc_feature (19)..(19): deoxy
  misc_feature (20)..(21): phosphorothioate linkage
auggcgagcgugauguccgtt

SEQ ID NO: 4961 - DNA, 21 bp, Artificial Sequence
  Synthetic
  misc_feature (1)..(1): 5'-3 attached inverted deoxyabasic moiety.
  misc_feature (1)..(1): 2'- deoxy-2'-fluoro
  misc_feature (2)..(2): 2'- O- methyl
  misc_feature (3)..(5): 2'- deoxy-2'-fluoro
  misc_feature (6)..(6): 2'- O- methyl
  misc_feature (7)..(8): 2'- deoxy-2'-fluoro
  misc_feature (9)..(9): 2'- O- methyl
  misc_feature (10)..(11): 2'- deoxy-2'-fluoro
  misc_feature (12)..(14): 2'- O- methyl
  misc_feature (15)..(19): 2'- deoxy-2'-fluoro
  misc_feature (21)..(21): 3'-3 attached inverted deoxyabasic moiety.
cgcucgccaucaaguuucutt

SEQ ID NO: 4962 - DNA, 21 bp, Artificial Sequence
  Synthetic
  misc_feature (1)..(1): 5'-3 attached inverted deoxyabasic moiety.
  misc_feature (1)..(1): 2'- deoxy-2'-fluoro
  misc_feature (2)..(3): 2'- O-methyl
  misc_feature (4)..(4): 2'- deoxy-2'-fluoro
  misc_feature (5)..(5): 2'- O-methyl
  misc_feature (6)..(6): 2'- deoxy-2'-fluoro
  misc_feature (7)..(8): 2'- O-methyl
  misc_feature (9)..(9): 2'- deoxy-2'-fluoro
  misc_feature (10)..(11): 2'- O-methyl
  misc_feature (12)..(12): 2'- deoxy-2'-fluoro
  misc_feature (13)..(13): 2'- O-methyl
  misc_feature (14)..(14): 2'- deoxy-2'-fluoro
  misc_feature (15)..(15): 2'- O-methyl
  misc_feature (16)..(16): 2'- deoxy-2'-fluoro
  misc_feature (17)..(18): 2'- O-methyl
  misc_feature (19)..(19): 2'- deoxy-2'-fluoro
  misc_feature (21)..(21): 3'-3 attached inverted deoxyabasic moiety.
cgacguggugguauacaautt

SEQ ID NO: 4963 - DNA, 21 bp, Artificial Sequence
  Synthetic
  misc_feature (1)..(1): 5'-3 attached inverted deoxyabasic moiety.
  misc_feature (1)..(1): 2'- O-methyl
  misc_feature (2)..(3): 2'- deoxy-2'-fluoro
  misc_feature (4)..(6): 2'- O-methyl
  misc_feature (7)..(7): 2'- deoxy-2'-fluoro
  misc_feature (8)..(8): 2'- O-methyl
  misc_feature (9)..(11): 2'- deoxy-2'-fluoro
  misc_feature (12)..(12): 2'- O-methyl
  misc_feature (13)..(17): 2'- deoxy-2'-fluoro
  misc_feature (18)..(18): 2'- O-methyl
  misc_feature (19)..(19): 2'- deoxy-2'-fluoro
  misc_feature (21)..(21): 3'-3 attached inverted deoxyabasic moiety.
gccgggugcccauccuuautt

SEQ ID NO: 4964 - DNA, 21 bp, Artificial Sequence
  Synthetic
  misc_feature (1)..(1): 5'-3 attached inverted deoxyabasic moiety.
  misc_feature (1)..(1): 2'- deoxy-2'-fluoro
  misc_feature (2)..(2): 2'- O-methyl
  misc_feature (3)..(4): 2'- deoxy-2'-fluoro
  misc_feature (5)..(5): 2'- O-methyl
  misc_feature (6)..(7): 2'- deoxy-2'-fluoro
  misc_feature (8)..(9): 2'- O-methyl
  misc_feature (10)..(13): 2'- deoxy-2'-fluoro
  misc_feature (14)..(14): 2'- O-methyl
  misc_feature (15)..(15): 2'- deoxy-2'-fluoro
  misc_feature (16)..(16): 2'- O-methyl
  misc_feature (17)..(19): 2'- deoxy-2'-fluoro
  misc_feature (21)..(21): 3'-3 attached inverted deoxyabasic moiety.
cauugcugacuccauacuutt

SEQ ID NO: 4965 - DNA, 21 bp, Artificial Sequence
  Synthetic
  misc_feature (1)..(1): 5'-3 attached inverted deoxyabasic moiety.
  misc_feature (1)..(1): 2'- deoxy-2'-fluoro
  misc_feature (2)..(4): 2'- O-methyl
  misc_feature (5)..(5): 2'- deoxy-2'-fluoro
  misc_feature (6)..(7): 2'- O-methyl
  misc_feature (8)..(9): 2'- deoxy-2'-fluoro
  misc_feature (10)..(11): 2'- O-methyl
  misc_feature (12)..(13): 2'- deoxy-2'-fluoro
  misc_feature (14)..(18): 2'- O-methyl
  misc_feature (19)..(19): 2'- deoxy-2'-fluoro
  misc_feature (21)..(21): 3'-3 attached inverted deoxyabasic moiety.
caggcaguuaacugagaautt

SEQ ID NO: 4966 - DNA, 21 bp, Artificial Sequence
  Synthetic
  misc_feature (1)..(1): 5'-3 attached inverted deoxyabasic moiety.
  misc_feature (1)..(3): 2'- deoxy-2'-fluoro
  misc_feature (4)..(7): 2'- O-methyl
  misc_feature (8)..(8): 2'- deoxy-2'-fluoro
  misc_feature (9)..(9): 2'- O-methyl
  misc_feature (10)..(11): 2'- deoxy-2'-fluoro
  misc_feature (12)..(12): 2'- O-methyl
  misc_feature (13)..(13): 2'- deoxy-2'-fluoro
  misc_feature (14)..(14): 2'- O-methyl
  misc_feature (15)..(15): 2'- deoxy-2'-fluoro
  misc_feature (16)..(16): 2'- O-methyl
  misc_feature (17)..(17): 2'- deoxy-2'-fluoro
  misc_feature (18)..(19): 2'- O-methyl
  misc_feature (21)..(21): 3'-3 attached inverted deoxyabasic moiety.
cccgggaugcuacacacaatt

SEQ ID NO: 4967 - DNA, 21 bp, Artificial Sequence
  Synthetic
  misc_feature (1)..(1): 5'-3 attached inverted deoxyabasic moiety.
  misc_feature (1)..(1): 2'- O-methyl
  misc_feature (2)..(2): 2'- deoxy-2'-fluoro
  misc_feature (3)..(3): 2'- O-methyl
  misc_feature (4)..(4): 2'- deoxy-2'-fluoro
  misc_feature (5)..(5): 2'- O-methyl
  misc_feature (6)..(8): 2'- deoxy-2'-fluoro
  misc_feature (9)..(9): 2'- O-methyl
  misc_feature (10)..(11): 2'- deoxy-2'-fluoro
  misc_feature (12)..(12): 2'- O-methyl
  misc_feature (13)..(13): 2'- deoxy-2'-fluoro
  misc_feature (14)..(14): 2'- O-methyl
  misc_feature (15)..(16): 2'- deoxy-2'-fluoro
  misc_feature (17)..(17): 2'- O-methyl
  misc_feature (18)..(18): 2'- deoxy-2'-fluoro
  misc_feature (19)..(19): 2'- O-methyl
  misc_feature (21)..(21): 3'-3 attached inverted deoxyabasic moiety.
guguacucgccgcgcuacatt

SEQ ID NO: 4968 - DNA, 21 bp, Artificial Sequence
  Synthetic
  misc_feature (1)..(1): 5'-3 attached inverted deoxyabasic moiety.
  misc_feature (1)..(1): 2'- deoxy-2'-fluoro
  misc_feature (2)..(4): 2'- O-methyl
  misc_feature (5)..(5): 2'- deoxy-2'-fluoro
  misc_feature (6)..(6): 2'- O-methyl
  misc_feature (7)..(8): 2'- deoxy-2'-fluoro
  misc_feature (9)..(9): 2'- O-methyl
  misc_feature (10)..(10): 2'- deoxy-2'-fluoro
  misc_feature (11)..(11): 2'- O-methyl
  misc_feature (12)..(14): 2'- deoxy-2'-fluoro
  misc_feature (15)..(15): 2'- O-methyl
  misc_feature (16)..(17): 2'- deoxy-2'-fluoro
  misc_feature (18)..(18): 2'- O-methyl
  misc_feature (19)..(19): 2'- deoxy-2'-fluoro
  misc_feature (21)..(21): 3'-3 attached inverted deoxyabasic moiety.
cggacaucacgcucgccautt

SEQ ID NO: 4969 - DNA, 21 bp, Artificial Sequence
  Synthetic
  misc_feature (1)..(5): 2'- O-methyl
  misc_feature (6)..(8): 2'- deoxy-2'-fluoro
  misc_feature (9)..(10): 2'- O-methyl
  misc_feature (11)..(11): 2'- deoxy-2'-fluoro
  misc_feature (12)..(13): 2'- O-methyl
  misc_feature (14)..(14): 2'- deoxy-2'-fluoro
  misc_feature (15)..(17): 2'- O-methyl
  misc_feature (18)..(18): 2'- deoxy-2'-fluoro
  misc_feature (19)..(19): 2'- O-methyl
  misc_feature (20)..(21): phosphorothioate linkage
agaaacuugauggcgagcgtt

SEQ ID NO: 4970 - DNA, 21 bp, Artificial Sequence
  Synthetic
  misc_feature (1)..(1): 2'- O-methyl
  misc_feature (2)..(3): 2'- deoxy-2'-fluoro
  misc_feature (4)..(4): 2'- O-methyl
  misc_feature (5)..(5): 2'- deoxy-2'-fluoro
  misc_feature (6)..(6): 2'- O-methyl
  misc_feature (7)..(7): 2'- deoxy-2'-fluoro
  misc_feature (8)..(8): 2'- O-methyl
  misc_feature (9)..(10): 2'- deoxy-2'-fluoro
  misc_feature (11)..(11): 2'- O-methyl
  misc_feature (12)..(13): 2'- deoxy-2'-fluoro
  misc_feature (14)..(14): 2'- O-methyl
  misc_feature (15)..(15): 2'- deoxy-2'-fluoro
  misc_feature (16)..(16): 2'- O-methyl
  misc_feature (17)..(18): 2'- deoxy-2'-fluoro
  misc_feature (19)..(19): 2'- O-methyl
  misc_feature (20)..(21): phosphorothioate linkage
auuguauaccaccacgucgtt

SEQ ID NO: 4971 - DNA, 21 bp, Artificial Sequence
  Synthetic
  misc_feature (1)..(1): 2'- O-methyl
  misc_feature (2)..(2): 2'- deoxy-2'-fluoro
  misc_feature (3)..(7): 2'- O-methyl
  misc_feature (8)..(8): 2'- deoxy-2'-fluoro
  misc_feature (9)..(11): 2'- O-methyl
  misc_feature (12)..(12): 2'- deoxy-2'-fluoro
  misc_feature (13)..(13): 2'- O-methyl
  misc_feature (14)..(16): 2'- deoxy-2'-fluoro
  misc_feature (17)..(18): 2'- O-methyl
  misc_feature (19)..(19): 2'- deoxy-2'-fluoro
  misc_feature (20)..(21): phosphorothioate linkage
auaaggaugggcacccggctt

SEQ ID NO: 4972 - DNA, 21 bp, Artificial Sequence
  Synthetic
  misc_feature (1)..(3): 2'- O-methyl
  misc_feature (4)..(4): 2'- deoxy-2'-fluoro
  misc_feature (5)..(5): 2'- O-methyl
  misc_feature (6)..(6): 2'- deoxy-2'-fluoro
  misc_feature (7)..(10): 2'- O-methyl
  misc_feature (11)..(12): 2'- deoxy-2'-fluoro
  misc_feature (13)..(14): 2'- O-methyl
  misc_feature (15)..(15): 2'- deoxy-2'-fluoro
  misc_feature (16)..(17): 2'- O-methyl
  misc_feature (18)..(18): 2'- deoxy-2'-fluoro
  misc_feature (19)..(19): 2'- O-methyl
  misc_feature (20)..(21): phosphorothioate linkage
aaguauggagucagcaaugtt

SEQ ID NO: 4973 - DNA, 21 bp, Artificial Sequence
  Synthetic
  misc_feature (1)..(1): 2'- O-methyl
  misc_feature (2)..(6): 2'- deoxy-2'-fluoro
  misc_feature (7)..(8): 2'- O-methyl
  misc_feature (9)..(10): 2'- deoxy-2'-fluoro
  misc_feature (11)..(12): 2'- O-methyl
  misc_feature (13)..(14): 2'- deoxy-2'-fluoro
  misc_feature (15)..(15): 2'- O-methyl
  misc_feature (16)..(18): 2'- deoxy-2'-fluoro
  misc_feature (19)..(19): 2'- O-methyl
  misc_feature (20)..(21): phosphorothioate linkage
auucucaguuaacugccugtt

SEQ ID NO: 4974 - DNA, 21 bp, Artificial Sequence
  Synthetic
  misc_feature (1)..(2): 2'- deoxy-2'-fluoro
  misc_feature (3)..(3): 2'- O-methyl
  misc_feature (4)..(4): 2'- deoxy-2'-fluoro
  misc_feature (5)..(5): 2'- O-methyl
  misc_feature (6)..(6): 2'- deoxy-2'-fluoro
  misc_feature (7)..(7): 2'- O-methyl
  misc_feature (8)..(8): 2'- deoxy-2'-fluoro
  misc_feature (9)..(10): 2'- O-methyl
  misc_feature (11)..(11): 2'- deoxy-2'-fluoro
  misc_feature (12)..(12): 2'- O-methyl
  misc_feature (13)..(16): 2'- deoxy-2'-fluoro
  misc_feature (17)..(19): 2'- O-methyl
  misc_feature (20)..(21): phosphorothioate linkage
uuguguguagcaucccgggtt

SEQ ID NO: 4975 - DNA, 21 bp, Artificial Sequence
  Synthetic
  misc_feature (1)..(1): 2'- deoxy-2'-fluoro
  misc_feature (2)..(2): 2'- O-methyl
  misc_feature (3)..(3): 2'- deoxy-2'-fluoro
  misc_feature (4)..(5): 2'- O-methyl
  misc_feature (6)..(6): 2'- deoxy-2'-fluoro
  misc_feature (7)..(7): 2'- O-methyl
  misc_feature (8)..(8): 2'- deoxy-2'-fluoro
  misc_feature (9)..(10): 2'- O-methyl
  misc_feature (11)..(11): 2'- deoxy-2'-fluoro
  misc_feature (12)..(14): 2'- O-methyl
  misc_feature (15)..(15): 2'- deoxy-2'-fluoro
  misc_feature (16)..(16): 2'- O-methyl
  misc_feature (17)..(17): 2'- deoxy-2'-fluoro
  misc_feature (18)..(18): 2'- O-methyl
  misc_feature (19)..(19): 2'- deoxy-2'-fluoro
  misc_feature (20)..(21): phosphorothioate linkage
uguagcgcggcgaguacactt

SEQ ID NO: 4976 - DNA, 21 bp, Artificial Sequence
  Synthetic
  misc_feature (1)..(1): 2'- O-methyl
  misc_feature (2)..(2): 2'- deoxy-2'-fluoro
  misc_feature (3)..(4): 2'- O-methyl
  misc_feature (5)..(5): 2'- deoxy-2'-fluoro
  misc_feature (6)..(8): 2'- O-methyl
  misc_feature (9)..(9): 2'- deoxy-2'-fluoro
  misc_feature (10)..(10): 2'- O-methyl
  misc_feature (11)..(11): 2'- deoxy-2'-fluoro
  misc_feature (12)..(13): 2'- O-methyl
  misc_feature (14)..(14): 2'- deoxy-2'-fluoro
  misc_feature (15)..(15): 2'- O-methyl
  misc_feature (16)..(18): 2'- deoxy-2'-fluoro
  misc_feature (19)..(19): 2'- O-methyl
  misc_feature (20)..(21): phosphorothioate linkage
auggcgagcgugauguccgtt

SEQ ID NO: 4977 - DNA, 21 bp, Artificial Sequence
  Synthetic
  misc_feature (1)..(1): 5'-3 attached inverted deoxyabasic moiety.
  misc_feature (21)..(21): 3'-3 attached inverted deoxyabasic moiety.
cgcucgccaucaaguuucutt

SEQ ID NO: 4978 - DNA, 21 bp, Artificial Sequence
  Synthetic
  misc_feature (1)..(1): 5'-3 attached inverted deoxyabasic moiety.
  misc_feature (21)..(21): 3'-3 attached inverted deoxyabasic moiety.
cgacguggugguauacaautt

SEQ ID NO: 4979 - DNA, 21 bp, Artificial Sequence
  Synthetic
  misc_feature (1)..(1): 5'-3 attached inverted deoxyabasic moiety.
  misc_feature (21)..(21): 3'-3 attached inverted deoxyabasic moiety.
gccgggugcccauccuuautt

SEQ ID NO: 4980 - DNA, 21 bp, Artificial Sequence
  Synthetic
  misc_feature (1)..(1): 5'-3 attached inverted deoxyabasic moiety.
  misc_feature (21)..(21): 3'-3 attached inverted deoxyabasic moiety.
cauugcugacuccauacuutt

SEQ ID NO: 4981 - DNA, 21 bp, Artificial Sequence
  Synthetic
  misc_feature (1)..(1): 5'-3 attached inverted deoxyabasic moiety.
  misc_feature (21)..(21): 3'-3 attached inverted deoxyabasic moiety.
caggcaguuaacugagaautt

SEQ ID NO: 4982 - DNA, 21 bp, Artificial Sequence
  Synthetic
  misc_feature (1)..(1): 5'-3 attached inverted deoxyabasic moiety.
  misc_feature (21)..(21): 3'-3 attached inverted deoxyabasic moiety.
cccgggaugcuacacacaatt

SEQ ID NO: 4983 - DNA, 21 bp, Artificial Sequence
  Synthetic
  misc_feature (1)..(1): 5'-3 attached inverted deoxyabasic moiety.
  misc_feature (21)..(21): 3'-3 attached inverted deoxyabasic moiety.
guguacucgccgcgcuacatt

SEQ ID NO: 4984 - DNA, 21 bp, Artificial Sequence
  Synthetic
  misc_feature (1)..(1): 5'-3 attached inverted deoxyabasic moiety.
  misc_feature (21)..(21): 3'-3 attached inverted deoxyabasic moiety.
cggacaucacgcucgccautt

SEQ ID NO: 4985 - DNA, 21 bp, Artificial Sequence
  Synthetic
  misc_feature (20)..(21): phosphorothioate linkage
agaaacuugauggcgagcgtt

SEQ ID NO: 4986 - DNA, 21 bp, Artificial Sequence
  Synthetic
  misc_feature (20)..(21): phosphorothioate linkage
auuguauaccaccacgucgtt

SEQ ID NO: 4987 - DNA, 21 bp, Artificial Sequence
  Synthetic
  misc_feature (20)..(21): phosphorothioate linkage
auaaggaugggcacccggctt

SEQ ID NO: 4988 - DNA, 21 bp, Artificial Sequence
  Synthetic
  misc_feature (20)..(21): phosphorothioate linkage
aaguauggagucagcaaugtt

SEQ ID NO: 4989 - DNA, 21 bp, Artificial Sequence
  Synthetic
  misc_feature (20)..(20): phosphorothioate linkage
auucucaguuaacugccugtt

SEQ ID NO: 4990 - DNA, 21 bp, Artificial Sequence
  Synthetic
  misc_feature (20)..(21): phosphorothioate linkage
uuguguguagcaucccgggtt

SEQ ID NO: 4991 - DNA, 21 bp, Artificial Sequence
  Synthetic
  misc_feature (20)..(21): phosphorothioate linkage
uguagcgcggcgaguacactt

SEQ ID NO: 4992 - DNA, 21 bp, Artificial Sequence
  Synthetic
  misc_feature (20)..(21): phosphorothioate linkage
auggcgagcgugauguccgtt

SEQ ID NO: 4993 - DNA, 21 bp, Artificial Sequence
  Synthetic
  misc_feature (1)..(5): 2'- O-methyl
  misc_feature (6)..(8): 2'- deoxy-2'-fluoro
  misc_feature (9)..(10): 2'- O-methyl
  misc_feature (11)..(11): 2'- deoxy-2'-fluoro
  misc_feature (12)..(13): 2'- O-methyl
  misc_feature (14)..(14): 2'- deoxy-2'-fluoro
  misc_feature (15)..(17): 2'- O-methyl
  misc_feature (18)..(18): 2'- deoxy-2'-fluoro
  misc_feature (19)..(19): 2'- O-methyl
  misc_feature (21)..(21): 3'-3 attached inverted deoxyabasic moiety.
agaaacuugauggcgagcgtt

SEQ ID NO: 4994 - DNA, 21 bp, Artificial Sequence
  Synthetic
  misc_feature (1)..(1): 2'- O-methyl
  misc_feature (2)..(3): 2'- deoxy-2'-fluoro
  misc_feature (4)..(4): 2'- O-methyl
  misc_feature (5)..(5): 2'- deoxy-2'-fluoro
  misc_feature (6)..(6): 2'- O-methyl
  misc_feature (7)..(7): 2'- deoxy-2'-fluoro
  misc_feature (8)..(8): 2'- O-methyl
  misc_feature (9)..(10): 2'- deoxy-2'-fluoro
  misc_feature (11)..(11): 2'- O-methyl
  misc_feature (12)..(13): 2'- deoxy-2'-fluoro
  misc_feature (14)..(14): 2'- O-methyl
  misc_feature (15)..(15): 2'- deoxy-2'-fluoro
  misc_feature (16)..(16): 2'- O-methyl
  misc_feature (17)..(18): 2'- deoxy-2'-fluoro
  misc_feature (19)..(19): 2'- O-methyl
  misc_feature (21)..(21): 3'-3 attached inverted deoxyabasic moiety.
auuguauaccaccacgucgtt

SEQ ID NO: 4995 - DNA, 21 bp, Artificial Sequence
  Synthetic
  misc_feature (1)..(1): 2'- O-methyl
  misc_feature (2)..(2): 2'- deoxy-2'-fluoro
  misc_feature (3)..(7): 2'- O-methyl
  misc_feature (8)..(8): 2'- deoxy-2'-fluoro
  misc_feature (9)..(11): 2'- O-methyl
  misc_feature (12)..(12): 2'- deoxy-2'-fluoro
  misc_feature (13)..(13): 2'- O-methyl
  misc_feature (14)..(16): 2'- deoxy-2'-fluoro
  misc_feature (17)..(18): 2'- O-methyl
  misc_feature (19)..(19): 2'- deoxy-2'-fluoro
  misc_feature (21)..(21): 3'-3 attached inverted deoxyabasic moiety.
auaaggaugggcacccggctt

SEQ ID NO: 4996 - DNA, 21 bp, Artificial Sequence
  Synthetic
  misc_feature (1)..(3): 2'- O-methyl
  misc_feature (4)..(4): 2'- deoxy-2'-fluoro
  misc_feature (5)..(5): 2'- O-methyl
  misc_feature (6)..(6): 2'- deoxy-2'-fluoro
  misc_feature (7)..(10): 2'- O-methyl
  misc_feature (11)..(12): 2'- deoxy-2'-fluoro
  misc_feature (13)..(14): 2'- O-methyl
  misc_feature (15)..(15): 2'- deoxy-2'-fluoro
  misc_feature (16)..(17): 2'- O-methyl
  misc_feature (18)..(18): 2'- deoxy-2'-fluoro
  misc_feature (19)..(19): 2'- O-methyl
  misc_feature (21)..(21): 3'-3 attached inverted deoxyabasic moiety.
aaguauggagucagcaaugtt

SEQ ID NO: 4997 - DNA, 21 bp, Artificial Sequence
  Synthetic
  misc_feature (1)..(1): 2'- O-methyl
  misc_feature (2)..(6): 2'- deoxy-2'-fluoro
  misc_feature (7)..(8): 2'- O-methyl
  misc_feature (9)..(10): 2'- deoxy-2'-fluoro
  misc_feature (11)..(12): 2'- O-methyl
  misc_feature (13)..(14): 2'- deoxy-2'-fluoro
  misc_feature (15)..(15): 2'- O-methyl
  misc_feature (16)..(18): 2'- deoxy-2'-fluoro
  misc_feature (19)..(19): 2'- O-methyl
  misc_feature (21)..(21): 3'-3 attached inverted deoxyabasic moiety.
auucucaguuaacugccugtt

SEQ ID NO: 4998 - DNA, 21 bp, Artificial Sequence
  Synthetic
  misc_feature (1)..(2): 2'- deoxy-2'-fluoro
  misc_feature (3)..(3): 2'- O-methyl
  misc_feature (4)..(4): 2'- deoxy-2'-fluoro
  misc_feature (5)..(5): 2'- O-methyl
  misc_feature (6)..(6): 2'- deoxy-2'-fluoro
  misc_feature (7)..(7): 2'- O-methyl
  misc_feature (8)..(8): 2'- deoxy-2'-fluoro
  misc_feature (9)..(10): 2'- O-methyl
  misc_feature (11)..(11): 2'- deoxy-2'-fluoro
  misc_feature (12)..(12): 2'- O-methyl
  misc_feature (13)..(16): 2'- deoxy-2'-fluoro
  misc_feature (17)..(19): 2'- O-methyl
  misc_feature (21)..(21): 3'-3 attached inverted deoxyabasic moiety.
uuguguguagcaucccgggtt

SEQ ID NO: 4999 - DNA, 21 bp, Artificial Sequence
  Synthetic
  misc_feature (1)..(1): 2'- deoxy-2'-fluoro
  misc_feature (2)..(2): 2'- O-methyl
  misc_feature (3)..(3): 2'- deoxy-2'-fluoro
  misc_feature (4)..(5): 2'- O-methyl
  misc_feature (6)..(6): 2'- deoxy-2'-fluoro
  misc_feature (7)..(7): 2'- O-methyl
  misc_feature (8)..(8): 2'- deoxy-2'-fluoro
  misc_feature (9)..(10): 2'- O-methyl
  misc_feature (11)..(11): 2'- deoxy-2'-fluoro
  misc_feature (12)..(14): 2'- O-methyl
  misc_feature (15)..(15): 2'- deoxy-2'-fluoro
  misc_feature (16)..(16): 2'- O-methyl
  misc_feature (17)..(17): 2'- deoxy-2'-fluoro
  misc_feature (18)..(18): 2'- O-methyl
  misc_feature (19)..(19): 2'- deoxy-2'-fluoro
  misc_feature (21)..(21): 3'-3 attached inverted deoxyabasic moiety.
uguagcgcggcgaguacactt

SEQ ID NO: 5000 - DNA, 21 bp, Artificial Sequence
  Synthetic
  misc_feature (1)..(1): 2'- O-methyl
  misc_feature (2)..(2): 2'- deoxy-2'-fluoro
  misc_feature (3)..(4): 2'- O-methyl
  misc_feature (5)..(5): 2'- deoxy-2'-fluoro
  misc_feature (6)..(8): 2'- O-methyl
  misc_feature (9)..(9): 2'- deoxy-2'-fluoro
  misc_feature (10)..(10): 2'- O-methyl
  misc_feature (11)..(11): 2'- deoxy-2'-fluoro
  misc_feature (12)..(13): 2'- O-methyl
  misc_feature (14)..(14): 2'- deoxy-2'-fluoro
  misc_feature (15)..(15): 2'- O-methyl
  misc_feature (16)..(18): 2'- deoxy-2'-fluoro
  misc_feature (19)..(19): 2'- O-methyl
  misc_feature (21)..(21): 3'-3 attached inverted deoxyabasic moiety.
auggcgagcgugauguccgtt

SEQ ID NO: 5001 - DNA, 21 bp, Artificial Sequence
  Synthetic
  misc_feature (21)..(21): 3'-3 attached inverted deoxyabasic moiety.
agaaacuugauggcgagcgtt

SEQ ID NO: 5002 - DNA, 21 bp, Artificial Sequence
  Synthetic
  misc_feature (21)..(21): 3'-3 attached inverted deoxyabasic moiety.
auuguauaccaccacgucgtt

SEQ ID NO: 5003 - DNA, 21 bp, Artificial Sequence
  Synthetic
  misc_feature (21)..(21): 3'-3 attached inverted deoxyabasic moiety.
auaaggaugggcacccggctt

SEQ ID NO: 5004 - DNA, 21 bp, Artificial Sequence
  Synthetic
  misc_feature (21)..(21): 3'-3 attached inverted deoxyabasic moiety.
aaguauggagucagcaaugtt

SEQ ID NO: 5005 - DNA, 21 bp, Artificial Sequence
  Synthetic
  misc_feature (21)..(21): 3'-3 attached inverted deoxyabasic moiety.
auucucaguuaacugccugtt

SEQ ID NO: 5006 - DNA, 21 bp, Artificial Sequence
  Synthetic
  misc_feature (21)..(21): 3'-3 attached inverted deoxyabasic moiety.
uuguguguagcaucccgggtt

SEQ ID NO: 5007 - DNA, 21 bp, Artificial Sequence
  Synthetic
  misc_feature (21)..(21): 3'-3 attached inverted deoxyabasic moiety.
uguagcgcggcgaguacactt

SEQ ID NO: 5008 - DNA, 21 bp, Artificial Sequence
  Synthetic
  misc_feature (21)..(21): 3'-3 attached inverted deoxyabasic moiety.
auggcgagcgugauguccgtt

SEQ ID NO: 5009 - DNA, 21 bp, Artificial Sequence
  Synthetic
  misc_feature (4)..(5): 2'- O-methyl
  misc_feature (6)..(8): 2'- deoxy-2'-fluoro
  misc_feature (9)..(10): 2'- O-methyl
  misc_feature (11)..(11): 2'- deoxy-2'-fluoro
  misc_feature (12)..(13): 2'- O-methyl
  misc_feature (14)..(14): 2'- deoxy-2'-fluoro
  misc_feature (15)..(17): 2'- O-methyl
  misc_feature (18)..(18): 2'- deoxy-2'-fluoro
  misc_feature (19)..(19): 2'- O-methyl
  misc_feature (20)..(21): phosphorothioate linkage
agaaacuugauggcgagcgtt

SEQ ID NO: 5010 - DNA, 21 bp, Artificial Sequence
  Synthetic
  misc_feature (4)..(4): 2'- O-methyl
  misc_feature (5)..(5): 2'- deoxy-2'-fluoro
  misc_feature (6)..(6): 2'- O-methyl
  misc_feature (7)..(7): 2'- deoxy-2'-fluoro
  misc_feature (8)..(8): 2'- O-methyl
  misc_feature (9)..(10): 2'- deoxy-2'-fluoro
  misc_feature (11)..(11): 2'- O-methyl
  misc_feature (12)..(13): 2'- deoxy-2'-fluoro
  misc_feature (14)..(14): 2'- O-methyl
  misc_feature (15)..(15): 2'- deoxy-2'-fluoro
  misc_feature (16)..(16): 2'- O-methyl
  misc_feature (17)..(18): 2'- deoxy-2'-fluoro
  misc_feature (19)..(19): 2'- O-methyl
  misc_feature (20)..(21): phosphorothioate linkage
auuguauaccaccacgucgtt

SEQ ID NO: 5011 - DNA, 21 bp, Artificial Sequence
  Synthetic
  misc_feature (4)..(7): 2'- O-methyl
  misc_feature (8)..(8): 2'- deoxy-2'-fluoro
  misc_feature (9)..(11): 2'- O-methyl
  misc_feature (12)..(12): 2'- deoxy-2'-fluoro
  misc_feature (13)..(13): 2'- O-methyl
  misc_feature (14)..(16): 2'- deoxy-2'-fluoro
  misc_feature (17)..(18): 2'- O-methyl
  misc_feature (19)..(19): 2'- deoxy-2'-fluoro
  misc_feature (20)..(20): phosphorothioate linkage
auaaggaugggcacccggctt

SEQ ID NO: 5012 - DNA, 21 bp, Artificial Sequence
  Synthetic
  misc_feature (4)..(4): 2'- deoxy-2'-fluoro
  misc_feature (5)..(5): 2'- O-methyl
  misc_feature (6)..(6): 2'- deoxy-2'-fluoro
  misc_feature (7)..(10): 2'- O-methyl
  misc_feature (11)..(12): 2'- deoxy-2'-fluoro
  misc_feature (13)..(14): 2'- O-methyl
  misc_feature (15)..(15): 2'- deoxy-2'-fluoro
  misc_feature (16)..(17): 2'- O-methyl
  misc_feature (18)..(18): 2'- deoxy-2'-fluoro
  misc_feature (19)..(19): 2'- O-methyl
  misc_feature (20)..(21): phosphorothioate linkage
aaguauggagucagcaaugtt

SEQ ID NO: 5013 - DNA, 21 bp, Artificial Sequence
  Synthetic
  misc_feature (4)..(6): 2'- deoxy-2'-fluoro
  misc_feature (7)..(8): 2'- O-methyl
  misc_feature (9)..(10): 2'- deoxy-2'-fluoro
  misc_feature (11)..(12): 2'- O-methyl
  misc_feature (13)..(14): 2'- deoxy-2'-fluoro
  misc_feature (15)..(15): 2'- O-methyl
  misc_feature (16)..(18): 2'- deoxy-2'-fluoro
  misc_feature (19)..(19): 2'- O-methyl
  misc_feature (20)..(21): phosphorothioate linkage
auucucaguuaacugccugtt

SEQ ID NO: 5014 - DNA, 21 bp, Artificial Sequence
  Synthetic
  misc_feature (4)..(4): 2'- deoxy-2'-fluoro
  misc_feature (5)..(5): 2'- O-methyl
  misc_feature (6)..(6): 2'- deoxy-2'-fluoro
  misc_feature (7)..(7): 2'- O-methyl
  misc_feature (8)..(8): 2'- deoxy-2'-fluoro
  misc_feature (9)..(10): 2'- O-methyl
  misc_feature (11)..(11): 2'- deoxy-2'-fluoro
  misc_feature (12)..(12): 2'- O-methyl
  misc_feature (13)..(16): 2'- deoxy-2'-fluoro
  misc_feature (17)..(19): 2'- O-methyl
  misc_feature (20)..(21): phosphorothioate linkage
uuguguguagcaucccgggtt

SEQ ID NO: 5015 - DNA, 21 bp, Artificial Sequence
  Synthetic
  misc_feature (4)..(5): 2'- O-methyl
  misc_feature (6)..(6): 2'- deoxy-2'-fluoro
  misc_feature (7)..(7): 2'- O-methyl
  misc_feature (8)..(8): 2'- deoxy-2'-fluoro
  misc_feature (9)..(10): 2'- O-methyl
  misc_feature (11)..(11): 2'- deoxy-2'-fluoro
  misc_feature (12)..(14): 2'- O-methyl
  misc_feature (15)..(15): 2'- deoxy-2'-fluoro
  misc_feature (16)..(16): 2'- O-methyl
  misc_feature (17)..(17): 2'- deoxy-2'-fluoro
  misc_feature (18)..(18): 2'- O-methyl
  misc_feature (19)..(19): 2'- deoxy-2'-fluoro
  misc_feature (20)..(21): phosphorothioate linkage
uguagcgcggcgaguacactt

SEQ ID NO: 5016 - DNA, 21 bp, Artificial Sequence
  Synthetic
  misc_feature (4)..(4): 2'- O-methyl
  misc_feature (5)..(5): 2'- deoxy-2'-fluoro
  misc_feature (6)..(8): 2'- O-methyl
  misc_feature (9)..(9): 2'- deoxy-2'-fluoro
  misc_feature (10)..(10): 2'- O-methyl
  misc_feature (11)..(11): 2'- deoxy-2'-fluoro
  misc_feature (12)..(13): 2'- O-methyl
  misc_feature (14)..(14): 2'- deoxy-2'-fluoro
  misc_feature (15)..(15): 2'- O-methyl
  misc_feature (16)..(18): 2'- deoxy-2'-fluoro
  misc_feature (19)..(19): 2'- O-methyl
  misc_feature (20)..(21): phosphorothioate linkage
auggcgagcgugauguccgtt

SEQ ID NO: 5017 - DNA, 21 bp, Artificial Sequence
  Description of Artificial Sequence:  synthetic
  misc_feature (1)..(1): 5'-3 attached terminal deoxyabasic moiety
  misc_feature (21)..(21): 3'-3 attached terminal deoxyabasic moiety
  misc_feature (1)..(19): n stands for any ribonucleotide
  misc_feature (20)..(21): n stands for any deoxyribonucleotide
nnnnnnnnnnnnnnnnnnnnn

SEQ ID NO: 5018 - DNA, 21 bp, Artificial Sequence
  Description of Artificial Sequence:  synthetic
  misc_feature (20)..(20): Phosphorothioate 3'-Internucleotide Linkage
  misc_feature (1)..(19): n stands for any ribonucleotide
  misc_feature (20)..(21): n stands for any deoxyribonucleotide
  misc_feature (21)..(21): 3'-3 attached terminal glyceryl moiety
nnnnnnnnnnnnnnnnnnnnn

SEQ ID NO: 5019 - RNA, 21 nt, Artificial Sequence
  Description of Artificial Sequence:  sythetic
  misc_feature (1)..(19): n can be a 2'-Fluoro or OCF3 pyrimidine or any 2'-O-methyl purine
  misc_feature (20)..(20): Phosphorothioate 3'-Internucleotide Linkage
  misc_feature (20)..(21): n stands for any nucleotide
nnnnnnnnnnnnnnnnnnnnn

SEQ ID NO: 5020 - RNA, 21 nt, Artificial Sequence
  Description of Artificial Sequence:  synthetic
  misc_feature (1)..(19): n can be a 2'-Fluoro or OCF3 pyrimidine or any 2'-O-methyl purine
  misc_feature (20)..(20): Phosphorothioate 3'-Internucleotide Linkage
  misc_feature (20)..(21): n stands for any nucleotide
  misc_feature (21)..(21): 3'-3 attached terminal glyceryl moiety
nnnnnnnnnnnnnnnnnnnnn

SEQ ID NO: 5021 - RNA, 21 nt, Artificial Sequence
  Description of Artificial Sequence:  synthetic
  misc_feature (1)..(19): n stands for any nucleotide wherein any pyrimidine is -OCF3 or 2'-Fluoro
  misc_feature (20)..(21): n stands for any nucleotide
  misc_feature (1)..(1): 5'-3 attached terminal deoxyabasic moiety
  misc_feature (21)..(21): 3'-3 attached terminal deoxyabasic moiety
nnnnnnnnnnnnnnnnnnnnn

SEQ ID NO: 5022 - RNA, 21 nt, Artificial Sequence
  Description of Artificial Sequence:  synthetic
  misc_feature (1)..(19): n stands for any nucleotide wherein any pyrimidine is 2'-Fluoro or -OCF3
  misc_feature (20)..(20): Phosphorothioate 3'-Internucleotide Linkage
  misc_feature (20)..(21): n stands for any nucleotide
  misc_feature (21)..(21): 3'-3 attached terminal glyceryl moiety
nnnnnnnnnnnnnnnnnnnnn

SEQ ID NO: 5023 - RNA, 21 nt, Artificial Sequence
  Description of Artificial Sequence:  synthetic
  misc_feature (1)..(19): n stands for any nucleotide wherein any pyrimidine 2'-Fluoro or -OCF3 and any purine is 2'-Deoxy
  misc_feature (20)..(21): n stands for any nucleotide
  misc_feature (1)..(1): 5'-3 attached terminal deoxyabasic moiety
  misc_feature (21)..(21): 3'-3 attached terminal deoxyabasic moiety
nnnnnnnnnnnnnnnnnnnnn

SEQ ID NO: 5024 - RNA, 21 nt, Artificial Sequence
  Description of Artificial Sequence:  synthetic
  misc_feature (1)..(19): n stands for any nucleotide wherein any pyrimidine is -OCF3 or 2'-Fluoro and any purine is 2-deoxy
  misc_feature (20)..(21): n stands for any nucleotide
  misc_feature (1)..(1): 5'-3 attached terminal deoxyabasic moiety
  misc_feature (21)..(21): 3'-3 attached terminal deoxyabasic moiety
nnnnnnnnnnnnnnnnnnnnn

SEQ ID NO: 5025 - DNA, 21 bp, Artificial Sequence
  Description of Artificial Sequence:  synthetic
  misc_feature (20)..(20): Phosphorothioate 3'-Internucleotide Linkage
  misc_feature (1)..(19): ribonucleotide
  misc_feature (1)..(1): 5'-3 attached abasic moiety
  misc_feature (21)..(21): 3'-3 attached abasic moiety
cgacguggugguauacaautt

SEQ ID NO: 5026 - DNA, 21 bp, Artificial Sequence
  Description of Artificial Sequence:  synthetic
  misc_feature (20)..(20): Phosphorothioate 3'-Internucleotide Linkage
  misc_feature (1)..(19): ribonucleotide
  misc_feature (21)..(21): 3'-3 attached terminal glyceryl moiety
cgacguggugguauacaautt

SEQ ID NO: 5027 - DNA, 21 bp, Artificial Sequence
  Description of Artificial Sequence:  synthetic
  misc_feature (20)..(20): Phosphorothioate 3'-Internucleotide Linkage
  misc_feature (1)..(19): pyrimidines are fluoro or -OCF3 Purines are 2-OMe
cgacguggugguauacaautt

SEQ ID NO: 5028 - DNA, 21 bp, Artificial Sequence
  Description of Artificial Sequence:  synthetic
  misc_feature (20)..(20): Phosphorothioate 3'-Internucleotide Linkage
  misc_feature (1)..(19): pyrimidines are fluoro or -OCF3 Purines are 2-OMe
  misc_feature (21)..(21): 3'-3 attached terminal glyceryl moiety
cgacguggugguauacaautt

SEQ ID NO: 5029 - DNA, 21 bp, Artificial Sequence
  Description of Artificial Sequence:  synthetic
  misc_feature (20)..(20): Phosphorothioate 3'-Internucleotide Linkage
  misc_feature (1)..(19): pyrimidines are fluoro or -OCF3
  misc_feature (21)..(21): 3'-3 attached abasic moiety
  misc_feature (1)..(1): 5'-3 attached abasic moiety
cgacguggugguauacaautt

SEQ ID NO: 5030 - DNA, 21 bp, Artificial Sequence
  Description of Artificial Sequence:  synthetic
  misc_feature (20)..(20): Phosphorothioate 3'-Internucleotide Linkage
  misc_feature (1)..(19): ribonucleotides where pyrimidines are 2'-F or -OCF3
  misc_feature (21)..(21): 3'-3 attached terminal glyceryl moiety
cgacguggugguauacaautt

SEQ ID NO: 5031 - DNA, 21 bp, Artificial Sequence
  Description of Artificial Sequence:  synthetic
  misc_feature (1)..(19): ribonucleotides where purines are deoxy and pyrimidines are 2'-F or -OCF3
  misc_feature (1)..(1): 5'-3 attached terminal abasic moiety
  misc_feature (21)..(21): 3'-3 attached terminal abasic moiety
cgacguggugguauacaautt

SEQ ID NO: 5032 - DNA, 21 bp, Artificial Sequence
  Description of Artificial Sequence:  synthetic
  misc_feature (20)..(20): Phosphorothioate 3'-Internucleotide Linkage
  misc_feature (1)..(19): ribonucleotides where purines are deoxy and pyrimidines are 2'-F or -OCF3
  misc_feature (21)..(21): 3'-3 attached terminal glyceryl moiety
cgacguggugguauacaautt

SEQ ID NO: 5033 - RNA, 14 nt, Artificial Sequence
  Description of Artificial Sequence:  synthetic
auauaucuauuucg

SEQ ID NO: 5034 - RNA, 14 nt, Artificial Sequence
  Description of Artificial Sequence:  synthetic
cgaaauaguauaua

SEQ ID NO: 5035 - RNA, 22 nt, Artificial Sequence
  Description of Artificial Sequence:  synthetic
cgaaauaguauauacuauuucg

SEQ ID NO: 5036 - DNA, 24 bp, Artificial Sequence
  Description of Artificial Sequence:  synthetic
  misc_feature (1)..(22): ribonucleotide
cgaaauaguauauacuauuucgtt
